(19) United States
(12) Patent Application Publication
(10) Pub. No.: US 2026/0009037 A1
(43) Pub. Date: Jan. 8, 2026

(54) RNAi Agents for Inhibiting Expression of Mitochondrial Amidoxime Reducing Component 1 (MARC1), Pharmaceutical Compositions Thereof, and Methods of Use

(71) Applicant: Arrowhead Pharmaceuticals, Inc., Pasadena, CA (US)

(72) Inventors: Jonathan Van Dyke, Burke, WI (US); Zhi-Ming Ding, Waunakee, WI (US); Zhao Xu, San Diego, CA (US); Lindsey Moser, Madison, WI (US); Daniel Braas, Madison, WI (US); Audra Winter, Lake Mills, WI (US); Anthony Nicholas, Oregon, WI (US); Tao Pei, Middleton, WI (US)

(21) Appl. No.: 19/328,832

(22) Filed: Sep. 15, 2025

Related U.S. Application Data
(63) Continuation of application No. PCT/US24/20222, filed on Mar. 15, 2024.
(60) Provisional application No. 63/490,694, filed on Mar. 16, 2023.

(51) Int. Cl. C12N 15/113; A61K 9/00; A61K 47/02; A61P 1/16

(52) U.S. Cl. CPC C12N 15/1137; A61K 9/0019; A61K 47/02; A61P 1/16; C12N 2310/11; C12N 2310/14; C12N 2310/312; C12N 2310/315; C12N 2310/321; C12N 2310/322; C12N 2310/351; C12N 2320/35; C12Y 107/00

(57) ABSTRACT

The present disclosure relates to RNAi agents, e.g., double stranded RNAi agents, able to inhibit mitochondrial amidoxime reducing component 1 (MARC1) gene expression. Also disclosed are pharmaceutical compositions that include MARC1 RNAi agents and methods of use thereof. The MARC1 RNAi agents disclosed herein may be conjugated to targeting ligands, including ligands that comprise N-acetyl-galactosamine, to facilitate the delivery to hepatocyte cells. Delivery of the MARC1 RNAi agents in vivo provides for inhibition of MARC1 gene expression. The RNAi agents can be used in methods of treatment of diseases, disorders, or symptoms mediated in part by MARC1 gene expression, including nonalcoholic steatohepatitis (NASH), nonalcoholic fatty liver disease (NAFLD), alcoholic fatty liver disease, autoimmune hepatitis, hepatic fibrosis, cirrhosis, elevated blood cholesterol levels, hypertriglyceridemia, liver disease, and/or other MARC1-related disease.

### CROSS REFERENCE TO RELATED APPLICATIONS

[0001] This application is a continuation application of International Application No. PCT/US2024/020222, filed Mar. 15, 2024, which claims the benefit of priority to U.S. Provisional Patent Application Ser. No. 63/490,694, filed on 16 Mar. 2023, the contents of which are incorporated herein by reference in their entirety.

### SEQUENCE LISTING

[0002] This application contains a Sequence Listing (in compliance with Standard ST26), which has been submitted in xml format and is hereby incorporated by reference in its entirety. The xml sequence listing file is named 30716-US1_SeqListing.xml. created September 15. 2025, and is 6,540,386 bytes in size.

### FIELD OF THE INVENTION

[0003] The present disclosure relates to RNA interference (RNAi) agents, e.g., double stranded RNAi agents such as chemically modified small (or short) interfering RNA (siRNA), for inhibition mitochondrial amidoxime reducing component 1 (MARC1), pharmaceutical compositions that include MARC1 RNAi agents, and methods of use thereof for the treatment of MARC1-related diseases and disorders.

### BACKGROUND

[0004] The mitochondrial amidoxime-reducing component (MARC) protein was first discovered and described as a molybdenum cofactor-containing component in the mitochondrial benzamidoxime prodrug-converting system in 2006. The human genome contains two MARC genes: MTARCI and 2 (commonly known as and referred to as simply MARC1 and 2, respectively), that encode MARC1 and MARC2 proteins which share significant homologies in sequence and function.

[0005] Researchers identified a rare missense variant in MARC1 (referred to as p.A165T mutation) that causes a loss-of-function in MARC1 protein, which mutation was associated with the protection against liver cirrhosis, the lowering hepatic fat, and reductions of other various biomarkers for liver disease. (Emdin CA, et al., A missense variant in Mitochondrial Amidoxime Reducing Component 1 gene and protection against liver disease, PLOS Genet. (April 2020): 16 (4): e1008629). Individuals homozygous for this loss-of-function mutation in MARC1 exhibit lower levels of hepatic fat and a decreased likelihood of physician-diagnosed fatty liver. Loss-of-function mutations in MARC1 are also associated with low blood levels of alanine transaminase, alkaline phosphatase, total cholesterol, and LDL-cholesterol.

[0006] While the exact mechanism of MARC1 with respect to the progression of liver disease is not yet fully understood, the reported linkage of MARC1 was further validated by recent genome-wide association studies focused on liver disease and autoimmune hepatitis, which further confirmed that the missense mutations in MARC1 and resulting loss-of-function were protective against liver injury and cirrhosis (Janik et al., MARC1 p.A165T variant is associated with decreased markers of liver injury and enhanced antioxidant capacity in autoimmune hepatitis. Sci Rep (2021): 11:24407). These aggregate data suggest that reductions in MARC1 protein may be able to lower blood cholesterol levels and protect against liver cirrhosis, and that inhibition of MARC1 is a potential therapeutic target for the treatment of liver disease.

### SUMMARY

[0007] There exists a need for novel RNA interference (RNAi) agents (termed RNAi agents, RNAi triggers, or triggers), e.g., double stranded RNAi agents such as chemically modified siRNAs, that are able to selectively and efficiently inhibit MARC1 gene expression. Further, there exists a need for compositions of novel MARC1-specific RNAi agents for use as a therapeutic or medicament for the treatment of MARC1-related diseases or disorders, such as nonalcoholic steatohepatitis (NASH), nonalcoholic fatty liver disease (NAFLD), alcoholic fatty liver disease, autoimmune hepatitis, hepatic fibrosis, cirrhosis, elevated blood cholesterol levels, hypertriglyceridemia, liver disease, and/or other MARC1-related disease.

[0008] The nucleotide sequences and chemical modifications of the MARC1 RNAi agents disclosed herein differ from those previously disclosed or known in the art. The MARC1 RNAi agents disclosed herein provide for highly specific, potent, and efficient in vivo and/or in vitro inhibition of the expression of a MARC1 gene.

[0009] In some embodiments, the sense strand comprises a nucleotide sequence of at least 15 contiguous nucleotides differing by 0 or 1 nucleotides from 15 contiguous nucleotides of any one of the sense strand sequences of Table 2, Table 4, Table 5, or Table 6D, and wherein the sense strand has a region of at least 85% complementarity over the 15 contiguous nucleotides to the antisense strand.

[0010] In some embodiments, disclosed herein are RNAi agents for inhibiting expression of a MARC1 gene, comprising:

[0011] an antisense strand wherein nucleotides 1-19 of the antisense strand comprise nucleotides 1-19 of the antisense strand sequences of Table 2, Table 3, or Table 6D, and a sense strand comprising a nucleotide sequence that is at least partially complementary to the antisense strand, wherein all or substantially all of the nucleotides of the antisense strand and/or the sense strand are modified nucleotides, and the RNAi agent is linked to a targeting ligand that comprises N-acetyl-galactosamine.

[0012] In some embodiments, disclosed herein are RNAi agents for inhibiting expression of a MARC1 gene, comprising a sense strand comprising a nucleotide sequence of at least 15 contiguous nucleotides differing by 0 or 1 nucleotides from 15 contiguous nucleotides of any one of the sense strand sequences of Table 2, Table 4, Table 5, or Table 6D, and wherein the sense strand has a region of at least 85% complementarity over the 15 contiguous nucleotides to the antisense strand.

[0013] In some embodiments, at least one nucleotide of the MARC1 RNAi agent includes a modified internucleoside linkage.

[0014] In some embodiments, the modified nucleotides of the MARC1 RNAi agents disclosed herein are selected from the group consisting of: 2′-O-methyl nucleotide, 2′-fluoro nucleotide, 2′-deoxy nucleotide, 2′,3′-seco nucleotide mimic, locked nucleotide, 2′-F-arabino nucleotide, 2′-methoxyethyl nucleotide, abasic nucleotide, ribitol, inverted nucleotide, inverted 2′-O-methyl nucleotide, inverted 2′-deoxy nucleotide, 2′-amino-modified nucleotide, 2′-alkyl-modified nucleotide, morpholino nucleotide, vinyl phosphonate-containing nucleotide, cyclopropyl phosphonate-containing nucleotide, and 3′-O-methyl nucleotide.

[0015] In other embodiments, all or substantially all of the modified nucleotides of the RNAi agents disclosed herein are 2′-O-methyl nucleotides, 2′-fluoro nucleotides, or combinations thereof.

[0016] In some embodiments, the antisense strand consists of, consists essentially of, or comprises the nucleotide sequence of any one of the modified antisense strand sequences of Table 3 or Table 6D.

[0017] In some embodiments, the sense strand consists of, consists essentially of, or comprises the nucleotide sequence of any of the modified sense strand sequences of Table 4, Table 5, or Table 6D.

[0018] In some embodiments, the antisense strand comprises the nucleotide sequence of any one of the modified sequences of Table 3 or Table 6D and the sense strand comprises the nucleotide sequence of any one of the modified sequences of Table 4 or Table 6D.

[0019] The RNAi agents disclosed herein are linked to a targeting ligand that comprises N-acetyl-galactosamine. In further embodiments, the targeting ligand is linked to the sense strand. In some embodiments, the targeting ligand is linked to the 5′ terminal end of the sense strand.

[0020] In some embodiments, the sense strand is between 15 and 30 nucleotides in length, and the antisense strand is between 19 and 30 nucleotides in length. In other embodiments, the sense strand and the antisense strand are each between 21 and 27 nucleotides in length. In other embodiments, the sense strand and the antisense strand are each between 21 and 24 nucleotides in length. In still other embodiments, sense strand and the antisense strand are each 21 nucleotides in length.

[0021] In some embodiments, the RNAi agents have two blunt ends.

[0022] In some embodiments, the sense strand comprises one or two terminal caps. In other embodiments, the sense strand comprises one or two inverted abasic residues.

[0023] In some embodiments, the RNAi agents are comprised of a sense strand and an antisense strand that form a duplex sequence of the duplex structures shown in Table 6A, 6B, 6C, or 6D.

[0024] In some embodiments, the sense strand further includes inverted abasic residues at the 3′ terminal end of the nucleotide sequence, at the 5′ end of the nucleotide sequence, or at both.

[0025] In further embodiments, the targeting ligand comprises or consists of:

[chemical structure]

[0026] Also disclosed herein are compositions comprising the disclosed RNAi agents, wherein the compositions further comprise a pharmaceutically acceptable excipient.

[0027] Additionally, provided herein are methods for inhibiting expression of a MARC1 gene in a hepatocyte cell in a human subject in vivo, the methods comprising introducing into the subject an effective amount of the disclosed MARC1 RNAi agents or the disclosed compositions.

[0028] Further provided herein are methods of treating a MARC1-related disease, disorder, or symptom, the methods comprising administering to a human subject in need thereof a therapeutically effective amount of the disclosed compositions.

[0029] In some embodiments, the disease is nonalcoholic steatohepatitis (NASH), alcoholic and nonalcoholic fatty liver disease (NAFLD), fatty liver disease, cirrhosis, elevated blood cholesterol levels, hypertriglyceridemia, liver disease, and/or other MARC1-related disease.

[0030] In some embodiments, the RNAi agents are administered at a dose of about 0.05 mg/kg to about 5.0 mg/kg of body weight of the human subject. In some embodiments, the MARC1 RNAi agents disclosed herein are administered in a fixed dose of a single injection containing about 50 mg, about 100 mg, about 200 mg, about 300 mg, or about 400 mg of MARC1 RNAi agent.

[0031] Also provided herein are usages of the disclosed RNAi agents or the disclosed compositions, for the treatment of a disease, disorder, or symptom that is mediated at least in part by MARC1 gene expression.

[0032] Further provided herein are usages of the disclosed RNAi agents or the disclosed compositions, for the preparation of a pharmaceutical compositions for treating a disease, disorder, or symptom that is mediated at least in part by MARC1 gene expression.

### DETAILED DESCRIPTION

[0033] The disclosed RNAi agents, compositions thereof, and methods of use may be understood more readily by reference to the following detailed description, which form a part of this disclosure. It is to be understood that the disclosure is not limited to what is specifically described and/or shown herein, and that the terminology used herein is for the purpose of describing particular embodiments by way of example only and is not intended to be limiting.

[0034] It is to be appreciated that while certain features of the disclosures included herein are, for clarity, described herein in the context of separate embodiments, they may also be provided in combination in a single embodiment. Conversely, various features of the disclosed methods that are, for brevity, described in the context of a single embodiment, may also be provided separately or in any subcombination.

### Definitions

[0035] As used herein, an “RNAi agent” means a chemical composition that contains an RNA or RNA-like (e.g., chemically modified RNA) oligonucleotide molecule that is capable of degrading or inhibiting (e.g., degrades or inhibits under appropriate conditions) translation of messenger RNA (mRNA) transcripts of a target mRNA in a sequence specific manner. As used herein, RNAi agents may operate through the RNA interference mechanism (i.e., inducing RNA interference through interaction with the RNA interference pathway machinery (RNA-induced silencing complex or RISC) of mammalian cells), or by any alternative mechanism(s) or pathway(s). While it is believed that RNAi agents, as that term is used herein, operate primarily through the RNA interference mechanism, the disclosed RNAi agents are not bound by or limited to any particular pathway or mechanism of action. RNAi agents disclosed herein are comprised of a sense strand and an antisense strand, and include, but are not limited to: small (or short) interfering RNAs (siRNAs), double stranded RNAs (dsRNA), micro RNAs (miRNAs), short hairpin RNAs (shRNA), and dicer substrates. The antisense strand of the RNAi agents described herein is at least partially complementary to the mRNA being targeted (i.e. MARC1 mRNA). RNAi agents can include one or more modified nucleotides and/or one or more non-phosphodiester linkages.

[0036] As used herein, the terms “silence.” “reduce.” “inhibit,” “down-regulate,” or “knockdown” when referring to expression of a given gene, mean that the expression of the gene, as measured by the level of RNA transcribed from the gene or the level of polypeptide, protein, or protein subunit translated from the mRNA in a cell, group of cells, tissue, organ, or subject in which the gene is transcribed, is reduced when the cell, group of cells, tissue, organ, or subject is treated with the RNAi agents described herein as compared to a second cell, group of cells, tissue, organ, or subject that has not or have not been so treated.

[0037] As used herein, the terms “sequence” and “nucleotide sequence” mean a succession or order of nucleobases or nucleotides, described with a succession of letters using standard nomenclature. A nucleic acid molecule can comprise unmodified and/or modified nucleotides. A nucleotide sequence can comprise unmodified and/or modified nucleotides.

[0038] As used herein, a “base.” “nucleotide base,” or “nucleobase,” is a heterocyclic pyrimidine or purine compound that is a component of a nucleotide, and includes the primary purine bases adenine and guanine, and the primary pyrimidine bases cytosine, thymine, and uracil. A nucleobase may further be modified to include, without limitation, universal bases, hydrophobic bases, promiscuous bases, size-expanded bases, and fluorinated bases. (See. e.g., Modified Nucleosides in Biochemistry, Biotechnology and Medicine, Herdewijn, P. ed. Wiley-VCH, 2008). The synthesis of such modified nucleobases (including phosphoramidite compounds that include modified nucleobases) is known in the art.

[0039] As used herein, the term “nucleotide” has the same meaning as commonly understood in the art. Thus, the term “nucleotide” as used herein, refers to a glycoside comprising a sugar moiety, a base moiety and a covalently linked group (linkage group), such as a phosphate or phosphorothioate internucleoside linkage group, and covers both naturally occurring nucleotides, such as DNA or RNA, and non-naturally occurring nucleotides comprising modified sugar and/or base moieties, which are also referred to as nucleotide analogs herein. Herein, a single nucleotide can be referred to as a monomer or unit.

[0040] As used herein, and unless otherwise indicated, the term “complementary,” when used to describe a first nucleobase or nucleotide sequence (e.g., RNAi agent sense strand or targeted mRNA) in relation to a second nucleobase or nucleotide sequence (e.g., RNAi agent antisense strand or a single-stranded antisense oligonucleotide), means the ability of an oligonucleotide or polynucleotide including the first nucleotide sequence to hybridize (form base pair hydrogen bonds under mammalian physiological conditions (or otherwise suitable in vivo or in vitro conditions)) and form a duplex or double helical structure under certain standard conditions with an oligonucleotide that includes the second nucleotide sequence. The person of ordinary skill in the art would be able to select the set of conditions most appropriate for a hybridization test. Complementary sequences include Watson-Crick base pairs or non-Watson-Crick base pairs and include natural or modified nucleotides or nucleotide mimics, at least to the extent that the above hybridization requirements are fulfilled. Sequence identity or complementarity is independent of modification. For example, a and Af, as defined herein, are complementary to U (or T) and identical to A for the purposes of determining identity or complementarity.

[0041] As used herein, “perfectly complementary” or “fully complementary” means that in a hybridized pair of nucleobase or nucleotide sequence molecules, all (100%) of the bases in a contiguous sequence of a first oligonucleotide will hybridize with the same number of bases in a contiguous sequence of a second oligonucleotide. The contiguous sequence may comprise all or a part of a first or second nucleotide sequence.

[0042] As used herein, “partially complementary” means that in a hybridized pair of nucleobase or nucleotide sequence molecules, at least 70%, but not all, of the bases in a contiguous sequence of a first oligonucleotide will hybridize with the same number of bases in a contiguous sequence of a second oligonucleotide. The contiguous sequence may comprise all or a part of a first or second nucleotide sequence.

[0043] As used herein, “substantially complementary” means that in a hybridized pair of nucleobase or nucleotide sequence molecules, at least 85%, but not all, of the bases in a contiguous sequence of a first oligonucleotide will hybridize with the same number of bases in a contiguous sequence of a second oligonucleotide. The contiguous sequence may comprise all or a part of a first or second nucleotide sequence.

[0044] As used herein, the terms “complementary.” “fully complementary.” “partially complementary.” and “substantially complementary” are used with respect to the nucleobase or nucleotide matching between the sense strand and the antisense strand of an RNAi agent, or between the antisense strand of an RNAi agent and a sequence of a MARC1 mRNA.

[0045] As used herein, the term “substantially identical” or “substantial identity,” as applied to a nucleic acid sequence means the nucleotide sequence (or a portion of a nucleotide sequence) has at least about 85% sequence identity or more, e.g., at least 90%, at least 95%, or at least 99% identity, compared to a reference sequence. Percentage of sequence identity is determined by comparing two optimally aligned sequences over a comparison window. The percentage is calculated by determining the number of positions at which the same type of nucleic acid base occurs in both sequences to yield the number of matched positions, dividing the number of matched positions by the total number of positions in the window of comparison and multiplying the result by 100 to yield the percentage of sequence identity. The inventions disclosed herein encompass nucleotide sequences substantially identical to those disclosed herein.

[0046] As used herein, the terms “individual”, “patient” and “subject”, are used interchangeably to refer to a member of any animal species including, but not limited to, birds, humans and other primates, and other mammals including commercially relevant mammals or animal models such as mice, rats, monkeys, cattle, pigs, horses, sheep, cats, and dogs. Preferably, the subject is a human.

[0047] As used herein, the terms “treat.” “treatment.” and the like, mean the methods or steps taken to provide relief from or alleviation of the number, severity, and/or frequency of one or more symptoms of a disease in a subject. As used herein, “treat” and “treatment” may include the prevention, management, prophylactic treatment, and/or inhibition or reduction of the number, severity, and/or frequency of one or more symptoms of a disease in a subject.

[0048] As used herein, the phrase “introducing into a cell,” when referring to an RNAi agent. means functionally delivering the RNAi agent into a cell. The phrase “functional delivery,” means delivering the RNAi agent to the cell in a manner that enables the RNAi agent to have the expected biological activity, e.g., sequence-specific inhibition of gene expression.

[chemical structure]

[0049] Unless stated otherwise, use of the symbol as used herein means that any group or groups may be linked thereto that is in accordance with the scope of the inventions described herein.

[0050] As used herein, the term “isomers” refers to compounds that have identical molecular formulae, but that differ in the nature or the sequence of bonding of their atoms or in the arrangement of their atoms in space. Isomers that differ in the arrangement of their atoms in space are termed “stereoisomers.” Stereoisomers that are not mirror images of one another are termed “diastereoisomers.” and stereoisomers that are non-superimposable mirror images are termed “enantiomers.” or sometimes optical isomers. A carbon atom bonded to four non-identical substituents is termed a “chiral center.”

[0051] As used herein, unless specifically identified in a structure as having a particular conformation, for each structure in which asymmetric centers are present and thus give rise to enantiomers, diastereomers, or other stereoisomeric configurations, each structure disclosed herein is intended to represent all such possible isomers, including their optically pure and racemic forms. For example, the structures disclosed herein are intended to cover mixtures of diastereomers as well as single stereoisomers.

[0052] As used in a claim herein, the phrase “consisting of” excludes any element, step, or ingredient not specified in the claim. When used in a claim herein, the phrase “consisting essentially of” limits the scope of a claim to the specified materials or steps and those that do not materially affect the basic and novel characteristic(s) of the claimed invention.

[0053] The person of ordinary skill in the art would readily understand and appreciate that the compounds and compositions disclosed herein may have certain atoms (e.g., N. O. or S atoms) in a protonated or deprotonated state, depending upon the environment in which the compound or composition is placed. Accordingly, as used herein, the structures disclosed herein envisage that certain functional groups, such as, for example, OH, SH, or NH, may be protonated or deprotonated. The disclosure herein is intended to cover the disclosed compounds and compositions regardless of their state of protonation based on the environment (such as pH), as would be readily understood by the person of ordinary skill in the art. Correspondingly, compounds described herein with labile protons or basic atoms should also be understood to represent salt forms of the corresponding compound. Compounds described herein may be in a free acid, free base, or salt form. Pharmaceutically acceptable salts of the compounds described herein should be understood to be within the scope of the invention.

[0054] As used herein, the term “linked” or “conjugated” when referring to the connection between two compounds or molecules means that two compounds or molecules are joined by a covalent bond. Unless stated, the terms “linked” and “conjugated” as used herein may refer to the connection between a first compound and a second compound either with or without any intervening atoms or groups of atoms.

[0055] As used herein, the term “including” is used to herein mean, and is used interchangeably with, the phrase “including but not limited to.” The term “or” is used herein to mean, and is used interchangeably with, the term “and/or.” unless the context clearly indicates otherwise.

[0056] Unless otherwise defined, all technical and scientific terms used herein have the same meaning as commonly understood by one of ordinary skill in the art. Although methods and materials similar or equivalent to those described herein can be used in the practice or testing of the present invention, suitable methods and materials are described below. All publications, patent applications, patents, and other references mentioned herein are incorporated by reference in their entirety. In case of conflict, the present specification, including definitions, will control. In addition, the materials, methods, and examples are illustrative only and not intended to be limiting.

[0057] Where a value is explicitly recited, it is to be understood that values which are about the same quantity or amount as the recited value are also within the scope of the disclosure. Where a combination is disclosed, each sub-combination of the elements of that combination is also specifically disclosed and is within the scope of the disclosure. Conversely, where different elements or groups of elements are individually disclosed, combinations thereof are also disclosed. Where any element of a disclosure is disclosed as having a plurality of alternatives, examples of that disclosure in which each alternative is excluded singly or in any combination with the other alternatives are also hereby disclosed: more than one element of a disclosure can have such exclusions, and all combinations of elements having such exclusions are hereby disclosed.

[0058] Other objects, features, aspects, and advantages of the invention will be apparent from the following detailed description, accompanying figures, and from the claims.

### DETAILED DESCRIPTION

### RNAi Agents

[0059] Described herein are RNAi agents for inhibiting expression of a MARC1 gene. Each MARC1 RNAi agent comprises a sense strand and an antisense strand. The sense strand can be 15 to 49 nucleotides in length. The antisense strand can be 19 to 49 nucleotides in length. The sense and antisense strands can be either the same length or they can be different lengths. In some embodiments, the sense and antisense strands are each independently 19 to 27 nucleotides in length. In some embodiments, both the sense and antisense strands are each 21-26 nucleotides in length. In some embodiments, the sense and antisense strands are each 21-24 nucleotides in length. In some embodiments, the sense strand is about 19 nucleotides in length while the antisense strand is about 21 nucleotides in length. In some embodiments, the sense strand is about 21 nucleotides in length while the antisense strand is about 23 nucleotides in length. In some embodiments, a sense strand is 23 nucleotides in length and an antisense strand is 21 nucleotides in length. In some embodiments. both the sense and antisense strands are each 21 nucleotides in length. In some embodiments, the RNAi agent antisense strands are each independently 21, 22. 23. 24, 25, 26, 27. 28, 29, or 30 nucleotides in length. In some embodiments, the RNAi agent sense strands are each independently 15, 16, 17, 18. 19, 20, 21, 22, 23, 24, 25, 26, 27, 28, 29, 30, 31, 32, 33, 34, 35, 36, 37, 38, 39, 40, 41, 42, 43, 44, 45, 46, 47. 48, or 49 nucleotides in length. The sense and antisense strands are annealed to form a duplex, and in some embodiments, a double-stranded RNAi agent has a duplex length of about 15. 16. 17, 18, 19, 20, 21. 22. 23, 24, 25, 26, 27. 28, 29, or 30 nucleotides.

[0060] Examples of nucleotide sequences used in forming MARC1 RNAi agents are provided in Tables 2. 3, 4, and 5. Examples of RNAi agent duplexes. that include the sense strand and antisense strand sequences in Tables 2, 3, 4, and 5, are shown in Tables 6A. and 6B.

[0061] In some embodiments, the region of perfect, substantial, or partial complementarity between the sense strand and the antisense strand is 15-26 (e.g., 15, 16, 17, 18, 19, 20, 21. 22. 23. 24. 25. or 26) nucleotides in length and occurs at or near the 5′ end of the antisense strand (e.g., this region may be separated from the 5′ end of the antisense strand by 0, 1, 2. 3, or 4 nucleotides that are not perfectly, substantially, or partially complementary).

[0062] A sense strand of the MARC1 RNAi agents described herein includes at least 15 consecutive nucleotides that have at least 85% identity to a core stretch sequence (also referred to herein as a “core stretch” or “core sequence”) of the same number of nucleotides in a MARC1 mRNA. In some embodiments, a sense strand core stretch sequence is 100% (perfectly) complementary or at least about 85% (substantially) complementary to a core stretch sequence in the antisense strand, and thus the sense strand core stretch sequence is typically perfectly identical or at least about 85% identical to a nucleotide sequence of the same length (sometimes referred to, e.g., as a target sequence) present in the MARC1 mRNA target. In some embodiments, this sense strand core stretch is 15, 16, 17, 18, 19, 20, 21, 22, or 23 nucleotides in length. In some embodiments, this sense strand core stretch is 17 nucleotides in length. In some embodiments, this sense strand core stretch is 19 nucleotides in length. In some embodiments, this sense strand core stretch is 21 nucleotides in length.

[0063] An antisense strand of a MARC1 RNAi agent described herein includes at least 15 consecutive nucleotides that have at least 85% complementarity to a core stretch of the same number of nucleotides in a MARC1 mRNA and to a core stretch of the same number of nucleotides in the corresponding sense strand. In some embodiments, an antisense strand core stretch is 100% (perfectly) complementary or at least about 85% (substantially) complementary to a nucleotide sequence (e.g., target sequence) of the same length present in the MARC1 mRNA target. In some embodiments, this antisense strand core stretch is 15, 16, 17, 18, 19, 20, 21, 22, or 23 nucleotides in length. In some embodiments, this antisense strand core stretch is 21 nucleotides in length. In some embodiments, this antisense strand core stretch is 19 nucleotides in length. A sense strand core stretch sequence can be the same length as a corresponding antisense core sequence or it can be a different length.

[0064] The MARC1 RNAi agent sense and antisense strands anneal to form a duplex. A sense strand and an antisense strand of a MARC1 RNAi agent can be partially, substantially, or fully complementary to each other. Within the complementary duplex region, the sense strand core stretch sequence is at least 85% complementary or 100% complementary to the antisense core stretch sequence. In some embodiments, the sense strand core stretch sequence contains a sequence of at least 15, at least 16, at least 17, at least 18, at least 19, at least 20, at least 21, at least 22, at least 23, at least 24, or at least 25 nucleotides that is at least 85% or 100% complementary to a corresponding 15, 16, 17, 18, 19. 20, 21, 22, 23, 24, or 25 nucleotide sequence of the antisense strand core stretch sequence (i.e., the sense and antisense core stretch sequences of a MARC1 RNAi agent have a region of at least 15, at least 16, at least 17, at least 18, at least 19, at least 20, at least 21, at least 22, at least 23, at least 24, or at least 25 nucleotides that is at least 85% base paired or 100% base paired.)

[0065] In some embodiments, the antisense strand of a MARC1 RNAi agent disclosed herein differs by 0, 1, 2, or 3 nucleotides from any of the antisense strand sequences in Table 2, or Table 3. In some embodiments, the sense strand of a MARC1 RNAi agent disclosed herein differs by 0, 1, 2, or 3 nucleotides from any of the sense strand sequences in Table 2. Table 4, or Table 5.

[0066] In some embodiments, the sense strand and/or the antisense strand can optionally and independently contain an additional 1. 2. 3, 4, 5, or 6 nucleotides (extension) at the 3′ end, the 5′ end, or both the 3′ and 5′ ends of the core stretch sequences. The antisense strand additional nucleotides, if present, may or may not be complementary to the corresponding sequence in the MARC1 mRNA. The sense strand additional nucleotides, if present, may or may not be identical to the corresponding sequence in the MARC1 mRNA. The antisense strand additional nucleotides, if present, may or may not be complementary to the corresponding sense strand's additional nucleotides, if present.

[0067] As used herein, an extension comprises 1, 2, 3, 4, 5, or 6 nucleotides at the 5′ and/or 3′ end of the sense strand core stretch sequence and/or antisense strand core stretch sequence. The extension nucleotides on a sense strand may or may not be complementary to nucleotides, either core stretch sequence nucleotides or extension nucleotides, in the corresponding antisense strand. Conversely, the extension nucleotides on an antisense strand may or may not be complementary to nucleotides, either core stretch nucleotides or extension nucleotides, in the corresponding sense strand. In some embodiments, both the sense strand and the antisense strand of an RNAi agent contain 3′ and 5′ extensions. In some embodiments, one or more of the 3′ extension nucleotides of one strand base pairs with one or more 5′ extension nucleotides of the other strand. In other embodiments, one or more of 3′ extension nucleotides of one strand do not base pair with one or more 5′ extension nucleotides of the other strand. In some embodiments, a MARC1 RNAi agent has an antisense strand having a 3′ extension and a sense strand having a 5′ extension. In some embodiments, the extension nucleotide(s) are unpaired and form an overhang. As used herein and in the art, an “overhang” refers to an extension of a stretch of one or more unpaired nucleotides located at a terminal end of either the sense strand or the antisense strand that does not form part of the hybridized or duplexed portion of an RNAi agent disclosed herein.

[0068] In some embodiments, a MARC1 RNAi agent comprises an antisense strand having a 3′ extension of 1, 2, 3, 4, 5, or 6 nucleotides in length. In other embodiments, a MARC1 RNAi agent comprises an antisense strand having a 3′ extension of 1, 2, or 3 nucleotides in length. In some embodiments, one or more of the antisense strand extension nucleotides comprise nucleotides that are complementary to the corresponding MARC1 mRNA sequence. In some embodiments, one or more of the antisense strand extension nucleotides comprise nucleotides that are not complementary to the corresponding MARC1 mRNA sequence.

[0069] In some embodiments, a MARC1 RNAi agent comprises a sense strand having a 3′ extension of 1, 2, 3, 4, or 5 nucleotides in length. In some embodiments, one or more of the sense strand extension nucleotides comprises adenosine, uracil, or thymidine nucleotides, AT dinucleotide, or nucleotides that correspond to or are the identical to nucleotides in the MARC1 mRNA sequence. In some embodiments, the 3′ sense strand extension includes or consists of one of the following sequences, but is not limited to: T. UT. TT. UU, UUT, TTT, or TTTT (each listed 5′ to 3′).

[0070] A sense strand can have a 3′ extension and/or a 5′ extension. In some embodiments, a MARC1 RNAi agent comprises a sense strand having a 5′ extension of 1, 2, 3, 4, 5, or 6 nucleotides in length. In some embodiments, one or more of the sense strand extension nucleotides comprise nucleotides that correspond to or are identical to nucleotides in the MARC1 mRNA sequence.

[0071] Examples of sequences used in forming MARC1 RNAi agents are provided in Tables 2, 3, 4, 5, and 6D. In some embodiments, a MARC1 RNAi agent antisense strand includes a sequence of any of the sequences in Tables 2, 3, or 6D. In certain embodiments, a MARC1 RNAi agent antisense strand comprises or consists of any one of the modified sequences in Table 3 or Table 6D. In some embodiments, a MARC1 RNAi agent antisense strand includes the sequence of nucleotides (from 5′ end →3′ end) 1-17. 2-15. 2-17. 1-18. 2-18, 1-19. 2-19, 1-20, 2-20, 1-21. or 2-21. of any of the sequences in Tables 2, 3 or 6D. In some embodiments, a MARC1 RNAi agent sense strand includes the sequence of any of the sequences in Tables 2, 4, 5, or 6D. In some embodiments, a MARC1 RNAi agent sense strand includes the sequence of nucleotides (from 5′ end →3′ end) 1-18. 1-19, 1-20, 1-21. 2-19, 2-20. 2-21. 3-20. 3-21, or 4-21 of any of the sequences in Tables 2, 4, 5, or 6D. In certain embodiments, a MARC1 RNAi agent sense strand comprises or consists of a modified sequence of any one of the modified sequences in Table 4, 5 or 6D.

[0072] In some embodiments, the sense and antisense strands of the RNAi agents described herein contain the same number of nucleotides. In some embodiments, the sense and antisense strands of the RNAi agents described herein contain different numbers of nucleotides. In some embodiments, the sense strand 5′ end and the antisense strand 3′ end of an RNAi agent form a blunt end. In some embodiments, the sense strand 3′ end and the antisense strand 5′ end of an RNAi agent form a blunt end. In some embodiments, both ends of an RNAi agent form blunt ends. In some embodiments, neither end of an RNAi agent is blunt-ended. As used herein a “blunt end” refers to an end of a double stranded RNAi agent in which the terminal nucleotides of the two annealed strands are complementary (form a complementary base-pair).

[0073] In some embodiments, the sense strand 5′ end and the antisense strand 3′ end of an RNAi agent form a frayed end. In some embodiments, the sense strand 3′ end and the antisense strand 5′ end of an RNAi agent form a frayed end. In some embodiments, both ends of an RNAi agent form a frayed end. In some embodiments, neither end of an RNAi agent is a frayed end. As used herein a frayed end refers to an end of a double stranded RNAi agent in which the terminal nucleotides of the two annealed strands from a pair (i.e., do not form an overhang) but are not complementary (i.e. form a non-complementary pair). In some embodiments, one or more unpaired nucleotides at the end of one strand of a double stranded RNAi agent form an overhang. The unpaired nucleotides may be on the sense strand or the antisense strand, creating either 3′ or 5′ overhangs. In some embodiments, the RNAi agent contains: a blunt end and a frayed end, a blunt end and 5′ overhang end, a blunt end and a 3′ overhang end, a frayed end and a 5′ overhang end, a frayed end and a 3′ overhang end, two 5′ overhang ends, two 3′ overhang ends, a 5′ overhang end and a 3′ overhang end, two frayed ends, or two blunt ends. Typically, when present, overhangs are located at the 3′ terminal ends of the sense strand, the antisense strand, or both the sense strand and the antisense strand.

[0074] The MARC1 RNAi agents disclosed herein may also be comprised of one or more modified nucleotides. In some embodiments, substantially all of the nucleotides of the sense strand and substantially all of the nucleotides of the antisense strand of the MARC1 RNAi agent are modified nucleotides. The MARC1 RNAi agents disclosed herein may further be comprised of one or more modified internucleoside linkages, e.g., one or more phosphorothioate linkages. In some embodiments, a MARC1 RNAi agent contains one or more modified nucleotides and one or more modified internucleoside linkages. In some embodiments, a 2′-modified nucleotide is combined with modified internucleoside linkage.

[0075] In some embodiments, a MARC1 RNAi agent is prepared or provided as a salt, mixed salt, or a free-acid. In some embodiments, a MARC1 RNAi agent is prepared as a pharmaceutically acceptable salt. In some embodiments, a MARC1 RNAi agent is prepared as a pharmaceutically acceptable sodium salt. Such forms that are well known in the art are within the scope of the inventions disclosed herein.

### Modified Nucleotides

[0076] Modified nucleotides, when used in various oligonucleotide constructs, can preserve activity of the compound in cells while at the same time increasing the serum stability of these compounds, and can also minimize the possibility of activating interferon activity in humans upon administering of the oligonucleotide construct.

[0077] In some embodiments, a MARC1 RNAi agent contains one or more modified nucleotides. As used herein, a “modified nucleotide” is a nucleotide other than a ribonucleotide (2′-hydroxyl nucleotide). In some embodiments, at least 50% (e.g., at least 60%, at least 70%, at least 80%, at least 90%, at least 95%, at least 97%, at least 98%, at least 99%, or 100%) of the nucleotides are modified nucleotides. As used herein, modified nucleotides can include, but are not limited to, deoxyribonucleotides, nucleotide mimics, abasic nucleotides, 2′-modified nucleotides, inverted nucleotides, modified nucleobase-comprising nucleotides, bridged nucleotides, peptide nucleic acids (PNAs), 2′,3′-seco nucleotide mimics (unlocked nucleobase analogues), locked nucleotides, 3′-O-methoxy (2′ internucleoside linked) nucleotides, 2′-F-Arabino nucleotides, 5′-Me, 2′-fluoro nucleotide, morpholino nucleotides, vinyl phosphonate deoxyribonucleotides, vinyl phosphonate containing nucleotides, and cyclopropyl phosphonate containing nucleotides. 2′-modified nucleotides (i.e., a nucleotide with a group other than a hydroxyl group at the 2′ position of the five-membered sugar ring) include, but are not limited to, 2′-O-methyl nucleotides (also referred to herein or in the art as 2′-methoxy nucleotides), 2′-fluoro nucleotides (also referred to herein or in the art as 2′-deoxy-2′-fluoro nucleotides), 2′-deoxy nucleotides, 2′-methoxyethyl (2′-O-2-methoxylethyl) nucleotides (also referred herein or in the art as 2′-MOE nucleotides), 2′-amino nucleotides, and 2′-alkyl nucleotides. It is not necessary for all positions in a given compound to be uniformly modified. Conversely, more than one modification can be incorporated in a single MARC1 RNAi agent or even in a single nucleotide thereof. The MARC1 RNAi agent sense strands and antisense strands can be synthesized and/or modified by methods known in the art. Modification at one nucleotide is independent of modification at another nucleotide.

[0078] Modified nucleobases include synthetic and natural nucleobases, such as 5-substituted pyrimidines, 6-azapyrimidines and N-2, N-6 and O-6 substituted purines, (e.g., 2-aminopropyladenine, 5-propynyluracil, or 5-propynylcytosine), 5-methylcytosine (5-me-C), 5-hydroxymethyl cytosine, inosine, xanthine, hypoxanthine, 2-aminoadenine, 6-alkyl (e.g., 6-methyl, 6-ethyl. 6-isopropyl. or 6-n-butyl) derivatives of adenine and guanine. 2-alkyl (e.g., 2-methyl, 2-ethyl, 2-isopropyl, or 2-n-butyl) and other alkyl derivatives of adenine and guanine. 2-thiouracil, 2-thiothymine, 2-thiocytosine, 5-halouracil, cytosine, 5-propynyl uracil, 5-propynyl cytosine. 6-azo uracil, 6-azo cytosine. 6-azo thymine, 5-uracil (pseudouracil), 4-thiouracil, 8-halo, 8-amino, 8-sulfhydryl, 8-thioalkyl, 8-hydroxyl and other 8-substituted adenines and guanines, 5-halo (e.g., 5-bromo), 5-trifluoromethyl, and other 5-substituted uracils and cytosines, 7-methylguanine and 7-methyladenine. 8-azaguanine and 8-azaadenine. 7-deazaguanine. 7-deazaadenine, 3-deazaguanine, and 3-deazaadenine.

[0079] In some embodiments, the 5′ and/or 3′ end of the antisense strand can include abasic residues (Ab), which can also be referred to as an “abasic site” or “abasic nucleotide.” An abasic residue (Ab) is a nucleotide or nucleoside that lacks a nucleobase at the 1′ position of the sugar moiety. In some embodiments, an abasic residue can be placed internally in a nucleotide sequence. In some embodiments, Ab or AbAb can be added to the 3′ end of the antisense strand. In some embodiments, the 5′ end of the sense strand can include one or more additional abasic residues (e.g., (Ab) or (AbAb)). In some embodiments, UUAb, UAb, or Ab are added to the 3′ end of the sense strand. In some embodiments, an abasic (deoxyribose) residue can be replaced with a ribitol (abasic ribose) residue.

[0080] In some embodiments, all or substantially all of the nucleotides of an RNAi agent are modified nucleotides. As used herein, an RNAi agent wherein substantially all of the nucleotides present are modified nucleotides is an RNAi agent having four or fewer (i.e., 0, 1, 2. 3, or 4) nucleotides in both the sense strand and the antisense strand being ribonucleotides (i.e., unmodified). As used herein, a sense strand wherein substantially all of the nucleotides present are modified nucleotides is a sense strand having two or fewer (i.e., 0. 1, or 2) nucleotides in the sense strand being unmodified ribonucleotides. As used herein, an antisense strand wherein substantially all of the nucleotides present are modified nucleotides is an antisense strand having two or fewer (i.e., 0), 1, or 2) nucleotides in the antisense strand being unmodified ribonucleotides. In some embodiments, one or more nucleotides of an RNAi agent is an unmodified ribonucleotide. Chemical structures for certain modified nucleotides are set forth in Table 7 herein.

### Modified Internucleoside Linkages

[0081] In some embodiments, one or more nucleotides of a MARC1 RNAi agent are linked by non-standard linkages or backbones (i.e., modified internucleoside linkages or modified backbones). Modified internucleoside linkages or backbones include, but are not limited to, phosphorothioate groups (represented herein as a lower case “s”), chiral phosphorothioates. thiophosphates, phosphorodithioates, phosphotriesters, aminoalkyl-phosphotriesters, alkyl phosphonates (e.g., methyl phosphonates or 3′-alkylene phosphonates), chiral phosphonates. phosphinates. phosphoramidates (e.g., 3′-amino phosphoramidate, aminoalkylphosphoramidates, or thionophosphoramidates), thionoalkyl-phosphonates, thionoalkylphosphotriesters, morpholino linkages, boranophosphates having normal 3′-5′ linkages, 2′-5′ linked analogs of boranophosphates, or boranophosphates having inverted polarity wherein the adjacent pairs of nucleoside units are linked 3′-5′ to 5′-3′ or 2′-5′ to 5′-2′. In some embodiments, a modified internucleoside linkage or backbone lacks a phosphorus atom. Modified internucleoside linkages lacking a phosphorus atom include, but are not limited to, short chain alkyl or cycloalkyl inter-sugar linkages, mixed heteroatom and alkyl or cycloalkyl inter-sugar linkages, or one or more short chain heteroatomic or heterocyclic inter-sugar linkages. In some embodiments, modified internucleoside backbones include, but are not limited to, siloxane backbones, sulfide backbones, sulfoxide backbones, sulfone backbones, formacetyl and thioformacetyl backbones, methylene formacetyl and thioformacetyl backbones, alkene-containing backbones, sulfamate backbones, methyleneimino and methylenehydrazino backbones, sulfonate and sulfonamide backbones, amide backbones, and other backbones having mixed N, O, S, and CH₂ components.

[0082] In some embodiments, a sense strand of a MARC1 RNAi agent can contain 1, 2, 3, 4, 5, or 6 phosphorothioate linkages, an antisense strand of a MARC1 RNAi agent can contain 1. 2. 3, 4, 5, or 6 phosphorothioate linkages, or both the sense strand and the antisense strand independently can contain 1. 2. 3, 4, 5, or 6 phosphorothioate linkages. In some embodiments, a sense strand of a MARC1 RNAi agent can contain 1, 2, 3, or 4 phosphorothioate linkages, an antisense strand of a MARC1 RNAi agent can contain 1, 2, 3, or 4 phosphorothioate linkages, or both the sense strand and the antisense strand independently can contain 1, 2, 3, or 4 phosphorothioate linkages.

[0083] In some embodiments, a MARC1 RNAi agent sense strand contains at least two phosphorothioate internucleoside linkages. In some embodiments, the phosphorothioate internucleoside linkages are between the nucleotides at positions 1-3 from the 3′ end of the sense strand. In some embodiments, one phosphorothioate internucleoside linkage is at the 5′ end of the sense strand nucleotide sequence, and another phosphorothioate linkage is at the 3′ end of the sense strand nucleotide sequence. In some embodiments, two phosphorothioate internucleoside linkages are located at the 5′ end of the sense strand, and another phosphorothioate linkage is at the 3′ end of the sense strand. In some embodiments, the sense strand does not include any phosphorothioate internucleoside linkages between the nucleotides, but contains one, two, or three phosphorothioate linkages between the terminal nucleotides on both the 5′ and 3′ ends and the optionally present inverted abasic residue terminal caps. In some embodiments, the targeting ligand is linked to the sense strand via a phosphorothioate linkage.

[0084] In some embodiments, a MARC1 RNAi agent antisense strand contains four phosphorothioate internucleoside linkages. In some embodiments, the four phosphorothioate internucleoside linkages are between the nucleotides at positions 1-3 from the 5′ end of the antisense strand and between the nucleotides at positions 19-21, 20-22, 21-23, 22-24, 23-25, or 24-26 from the 5′ end. In some embodiments, three phosphorothioate internucleoside linkages are located between positions 1˜4 from the 5′ end of the antisense strand, and a fourth phosphorothioate internucleoside linkage is located between positions 20-21 from the 5′ end of the antisense strand. In some embodiments, a MARC1 RNAi agent contains at least three or four phosphorothioate internucleoside linkages in the antisense strand.

### Capping Residues or Moieties

[0085] In some embodiments, the sense strand may include one or more capping residues or moieties, sometimes referred to in the art as a “cap.” a “terminal cap.” or a “capping residue.” As used herein, a “capping residue” is a non-nucleotide compound or other moiety that can be incorporated at one or more termini of a nucleotide sequence of an RNAi agent disclosed herein. A capping residue can provide the RNAi agent, in some instances, with certain beneficial properties, such as, for example, protection against exonuclease degradation. In some embodiments, inverted abasic residues (invAb) (also referred to in the art as “inverted abasic sites”) are added as capping residues. (See, e.g., F. Czauderna, Nucleic Acids Res., 2003, 31 (11), 2705-16: U.S. Pat. No. 5,998,203). Capping residues are generally known in the art, and include, for example, inverted abasic residues as well as carbon chains such as a terminal C3H7 (propyl), C6H13 (hexyl), or C12H25 (dodecyl) groups. In some embodiments, a capping residue is present at either the 5′ terminal end, the 3′ terminal end, or both the 5′ and 3′ terminal ends of the sense strand. In some embodiments, the 5′ end and/or the 3′ end of the sense strand may include more than one inverted abasic deoxyribose moiety as a capping residue.

[0086] In some embodiments, one or more inverted abasic residues (invAb) are added to the 3′ end of the sense strand. In some embodiments, one or more inverted abasic residues (invAb) are added to the 5′ end of the sense strand. In some embodiments, one or more inverted abasic residues or inverted abasic sites are inserted between the targeting ligand and the nucleotide sequence of the sense strand of the RNAi agent. In some embodiments, the inclusion of one or more inverted abasic residues or inverted abasic sites at or near the terminal end or terminal ends of the sense strand of an RNAi agent allows for enhanced activity or other desired properties of an RNAi agent.

[0087] In some embodiments, one or more inverted abasic residues (invAb) are added to the 5′ end of the sense strand. In some embodiments, one or more inverted abasic residues can be inserted between the targeting ligand and the nucleotide sequence of the sense strand of the RNAi agent. The inverted abasic residues may be linked via phosphate, phosphorothioate (e.g., shown herein as (invAb) s)), or other internucleoside linkages. In some embodiments, the inclusion of one or more inverted abasic residues at or near the terminal end or terminal ends of the sense strand of an RNAi agent may allow for enhanced activity or other desired properties of an RNAi agent. In some embodiments, an inverted abasic (deoxyribose) residue can be replaced with an inverted ribitol (abasic ribose) residue. In some embodiments, the 3′ end of the antisense strand core stretch sequence, or the 3′ end of the antisense strand sequence, may include an inverted abasic residue. The chemical structures for inverted abasic deoxyribose residues are shown in Table 7 below.

### MARC1 RNAi Agents

[0088] The MARC1 RNAi agents disclosed herein are designed to target specific positions on a MARC1 gene (e.g., SEQ ID NO:1).

[0089] Homo sapiens. mitochondrial amidoxime reducing component 1 (MARC1). mRNA transcript (SEQ ID NO: 1) (7287 bases). NCBI Reference Sequence: NM_022746.4:

```
      1 cttgccgccg ccacctcgcg gagaagccag ccatgggcgc cgccggctcc tccgcgctgg
    61 cgcgctttgt cctcctcgcg caatcccggc ccgggtggct cggggttgcc gcgctgggcc
  121 tgaccgcggt ggcgctgggg gctgtcgcct ggcgccgcgc atggcccacg cggcgccggc
  181 ggctgctgca gcaggtgggc acagtggcgc agctctggat ctaccctgtg aaatcctgca
  241 agggggtgcc ggtgagcgag gcggagtgca cggccatggg gctgcgcagc ggcaacctgc
  301 gggacaggtt ttggcttgtg atcaaccagg agggaaacat ggttactgct cgccaggaac
  361 ctcgcctggt cctgatttcc ctgacctgcg atggtgacac cctgactctc agtgcagcct
  421 acacaaagga cctactactg cctatcaaaa cgcccaccac aaatgcagtg cacaagtgca
  481 gagtgcacgg cctggagata gagggcaggg actgtggcga ggccaccgcc cagtggataa
  541 ccagcttcct gaagtcacag ccctaccgcc tggtgcactt cgagcctcac atgcgaccga
  601 gacgtcctca tcaaatagca gacttgttcc gacccaagga ccagattgct tactcagaca
  661 ccagcccatt cttgatcctt tctgaggcgt cgctggcgga tctcaactcc aggctagaga
  721 agaaagttaa agcaaccaac ttcaggccca atattgtaat ttcaggatgc gatgtctatg
  781 cagaggattc ttgggatgag cttcttattg gtgacgtgga actgaaaagg gtgatggctt
  841 gttccagatg cattttaacc acagtggacc cagacaccgg tgtcatgagc aggaaggaac
  901 cgctggaaac actgaagagt tatcgccagt gtgacccttc agaacgaaag ttatatggaa
  961 aatcaccact ctttgggcag tattttgtgc tggaaaaccc agggaccatc aaagtgggag
1021 accctgtgta cctgctgggc cagtaatggg aaccgtatgt cctggaatat tagatgcctt
1081 ttaaaaatgt tctcaaaaat gacaacactt gaagcatggt gtttcagaac tgagacctct
1141 acattttctt taaatttgtg attttcacat ttttcgtctt ttggacttct ggtgtctcaa
1201 tgcttcaatg tcccagtgca aaaagtaaag aaatatagtc tcaataactt agtaggactt
1261 cagtaagtca cttaaatgac aagacaggat tctgaaaact ccccgtttaa ctgattatgg
1321 aatagttctt tctcctgctt ctccgtttat ctaccaagag cgcagacttg catcctgtca
1381 ctaccactcg ttagagaaag agaagaagag aaagaggaag agtgggtggg ctggaagaat
1441 atcctagaat gtgttattgc ccctgttcat gaggtacgca atgaaaatta aattgcaccc
1501 caaatatggc tggaatgcca cttccctttt cttctcaagc cccgggctag cttttgaaat
1561 ggcataaaga ctgaggtgac cttcaggaag cactgcagat attaattttc catagatctg
1621 gatctggccc tgctgcttct cagacagcat tggatttcct aaaggtgctc aggaggatgg
1681 ttgtgtagtc atggaggacc cctggatcct tgccattccc ctcagctaat gacggagtgc
1741 tccttctcca gttccgggtg aaaaagttct gaattctgtg gaggagaaga aaagtgattc
1801 agtgatttca gatagactac tgaaaacctt taaaggggga aaaggaaagc atatgtcagt
1861 tgtttaaaac ccaatatcta ttttttaact gattgtataa ctctaagatc tgatgaagta
1921 tattttttat tgccattttg tcctttgatt atattgggaa gttgactaaa cttgaaaaat
1981 gtttttaaaa ctgtgaataa atggaagcta ctttgactag tttcagatct tactaacttc
2041 ttggcacaaa gttagactgt gaaagctgac tgaggctggg cacaggggct catgcctgta
2101 attccagcac tttgggaggc caaggtggga gaatggcttg agcccaggag tttgagacca
2161 gcccagaaaa tataatggga tcctgtcgct acaaaatgtt tttaaaatgc actcggtgtg
2221 gtggtgtgtg cctgcagtcc tggctatggc tactcgggag gatgaggtag aaggattggt
2281 tgagcccagg agcgggagat tgaggctgca gtgagttatg attgcaccac tacactccag
2341 cctgagtgat agagtgagac cctatctcta aaaaagaaac aggaaaaaaa aagaaagctg
2401 actgaggtga atgggcaaag ccagtaattc tgacacctga ccacagctgg gtcttctgca
2461 taatggacct cctcacccac agcctcccag gcaagcaccc atgtttgaag gactatcaag
2521 tcaacatgct ttttaccaaa agctgcacat ttttcacttt gattttataa aagaggtcag
2581 taatcgctga aatctagctg agccctgaag taaagttctg agcaaagagg tgcatgtgct
2641 tgttttatgg ttggtgaatt attacagttt gttttctgca tgcttggcat gaggtgaata
2701 attacatcaa ttttccagag aacctgggcc atcaccttcc ccaacaagtc cagttgatgt
2761 tgaaactaca gatagattga gacaaagcga agtgttcagc aagtagcatt actaatggga
2821 ccgggggacc cgtgggagag tgagtgtaca caggatttag gaaaccatgt gaatatgggc
2881 tctctgggaa tagccaatag gtagggagca atcagaaacc caaggtttgg tggctcttcc
2941 taggtattta taattagtgg caagtgaaag ccttagtcct gaatttctaa ccacttgtaa
3001 gaactaacag ccacttctct gtgccccgtc cgggcagtaa ccatcattct ccatggacag
3061 gctctcgggg tagctagctc tgcagggcag cacccacgtg gaagggagca cccagaaacc
3121 ctcctcactg ggcagacctg tccttctgtg cctcacagtg tgaggaagat tcctgtttga
3181 agagagaagt tccagtgacc tctagaatct cagagtagtt gccaagcttt ctgtcagtga
3241 gatttaaagg ccatttactt gtgtttattt tatatttaat gagttggtta atgccagaga
3301 caaagctgat atcccattta ttttggatac tgagcatttg cacactattc cacttgaaat
3361 atagaatcag gaatgtaggc catcccagac tttcagatct tacaacagca aatgacagat
3421 gtttgagatc aggccaaaat atccaccctc ggtgggcatc tcctctgtgt ggcaacttat
3481 gctgcagcca cagtggggag tcacaaactc agagctggag gtcttgaaaa ggacaatgtg
3541 ggccaggctc cggaggggct gcctaaaggc ttgcttttgt gactctcctg cagaaaatgt
3601 tagaaacttc caaccgaaag acgagggcag caacttatac acacgaaggc agaaagaaat
3661 tggggaaggg gaggctgttg gaattcaggc cgttgtccta tagggagaaa tactcctcct
3721 ctccttctcc ctttactgat aacggggcat ggtgaggaga tgagcttgtg agggtctgcc
3781 agtttggtaa gagtgcatgg ggaggttggg taaattagac tagccaaatg ggacttcggg
3841 aaaccattta tgaggctgtc accaacagtg atggcaggct gaaattccag gcaagtgctc
3901 ccagcattcc aagagtgtat caaattaaag caacccatga tggtggagaa cagatacatt
3961 aaagttcctt gaaaatgaca gagtggctct cagaccagac cttgattgtg ggtataatcg
4021 gagtgttgct accacaccct aacactgcat ttcccgtgtt ttattggtcc atggaattct
4081 gaaagtttgc ctttcgggat gcttctaaaa acaattccat ggaccagtaa gtttggaaag
4141 tcctgcgtgc ctcacttctc ttcaaaggca aaaggctctg gagaggcctt catgaagaca
4201 tctgtgttta atgctgccct tcccaaaggt ctgtttttga ctgtcttttg agaaatgatc
4261 ctctgatctc taggcagaat gccagtgagc caaggaatcc cagttagcag gaggggtgca
4321 ctcatgggaa gactgaagaa gttaaaagtt cccgccaagt gaaggagacc tatcttggga
4381 cacttcccct tgtcctctcc cttgcccctc ttgctggagt aaaaggatgg aactgggact
4441 tgataggtta aaggaggtgt ggagaagtgt cttagaccag ctctcctgtt gtgggcctta
4501 gggagaagca ctctctttct tcgggatcat tttccaaaca tgcatttttg gatggatagg
4561 gtggatcagg gtgagggaag ggaaaccaaa ctctctctaa ccttgccctt acagcaatac
4621 ctgtgatgta agttacaaaa ccacctgtga tgaaagtgct ccaggatgct tcatgcacca
4681 gggaggggtg ccctgtttct cttctgctag cttctccttt cttttttttt tttcttcttt
4741 tttttgagac agtgtctcac tctgttgcca ggctggagtg cagtggtgag atctcagctc
4801 actgcagcct ctgcctccca ggttcaagca attcttctgc ctcagcctcc cgagtagctg
4861 gtgtgtctgg agttggttcc ttctggtggg ttcttggtct cgctgacttc aagaatgaag
4921 ccacagacct tcgcagtgag tgttacagct cttaaaggtg gcacggaccc aaagtgagca
4981 gtagcaagat ttattgtgga gagcgaaaga acaaagcttc ggaaggggac ccaaatgggc
5041 tgctgctgct ggctggggtg gccacctttt attcccttat ttgtccctgc ccatgtcctg
5101 ctgattgctc cattttacag agtgctgatt ggtccatttt acagagtgct gattggtgca
5161 tttacaatcc tttagctaga cacagagtgc cgattggtga gtttttacag tgctgattgg
5221 tgcatttaca atcctttagc tagacacaga acactgactg gtgcatttat aatcctctag
5281 ctagaaagaa aagttctcca agtccccact agacccagga agtccagctg gcttcacctc
5341 tcactgggac tacaggtgca caccaccaca cccagctaat ttttgtattt ttagtagaga
5401 cggggtttca ccatgttgtt caggatggtc tcgaactctt gatctcgtga tctgcccgcc
5461 tcggcctccc aaagtgctgg gattacagtt gtgagccacc acgcccggcc ctagcttttc
5521 ctttctgttg caagtcctct caactagtgt tgccttccac cctacaaagc agaattacct
5581 cagaagtcct atggccctga ctctatctat gtctgcacaa agcactactg tgctttgctg
5641 tctgcaagaa cagagattgt ttgcttcaac cactttctct gaatggatga atgagttatg
5701 atgatatcta aagttaccca atttcaagca agaggaagaa tctggctcgg taccacagat
5761 gttcttggaa ttgggatagt aaaaaagtcc ctgaggcatc ccttggtctg ctctgaccac
5821 actctcttca caggaagagg cttgggccac agctctgact ataactctgc tcttcctcca
5881 aacacagctg aggaattggg tggtggggca cctgctccca tgctctgtgg cctggctcag
5941 agagaagagt tgccttaatt acattattat tcttcctgga caggctgtag gttgtgtaaa
6001 gtaacaaaaa ggactgagaa gtgacttccc attcagcctc ttccaaggcc atttttgata
6061 ggcaggtcaa attcactcac atttggttat ttgttggcca gtctagtgca ttcacccttg
6121 ctggtcctca gtcatgctcc tttaccttta cagagcatcc tagactgctc ttcctcttac
6181 cttccttgtg aaacccacaa cccctagtcc ctccccttcc ctggcatttg ttatgccctc
6241 taccaatccc tgacctggta ttggtcagtc tccaatcctg gtggatccct gtgggaacta
6301 agttaagtct aacttttgtc tccctcttta gaatttactg ggagtactgt aaataaacta
6361 ttgttgttat aattatttct gattaacatt tttacaccta acaaagtctc agagagattg
6421 aatttactgg gttgaaggga ggagcacctt ccacatgacc tgcccagcaa ttaaagccgc
6481 ttgttagtcc gaggcccagg acggccgagg acagctggag agctcttcgt tgcaggcagc
6541 tctggttaac atcaaccggg aaagctcttt gtaaacacat gaataattga tcgtccagcg
6601 ctcacatagc taccgcggat ctgagcccgt atgactcatt tgcgagccat tcctgtcgtc
6661 tggatgccat aacattggag gaatgatgat cgtttcttgg aggttcttct gtggccagag
6721 ttgccaagac caaggctgta atggtttgtt atgatgacct ttgttattcc attaggctca
6781 attgctttaa aaaatgatgt gtgcatactt taggaacgtt tttacccttt atgttgacct
6841 gacatcatag tttatattat aaaatgtatt aatgacagaa gagtgttttc atgtcccaag
6901 gacaaatttt aacaaccata atctgccctc agtcatcata aatataaatg tattggtcaa
6961 acagatctcg ttaatgtggc caagataaat gcaagtctat attttaaggc agtcgaagtc
7021 ctagagaata tatctggagc ttttgtgggg ctaagagatc ttgtatatat gctatcaaaa
7081 ggctgagaaa attaacatgt tcccccctct gattttgcat tggacagata taaatgtctt
7141 ggggatgtca agtaagattg ttcacatagt ttctggacac cattaatgcc tgatggggtg
7201 aatcttagtt cttaaagcta tattctgctc attatgctca cagggctttt gaaaagagaa
7261 caaaataaag atttcaagtc ttagcaa
```

[0090] As defined herein, an antisense strand sequence is designed to target a MARC1 gene at a given position on the gene when the 5′ terminal nucleobase of the antisense strand is aligned with a position that is 21 nucleotides downstream (towards the 3′ end) from the position on the gene when base pairing to the gene. For example, as illustrated in Tables 1 and 2 herein, an antisense strand sequence designed to target a MARC1 gene at position 1275 requires that when base pairing to the gene, the 5′ terminal nucleobase of the antisense strand is aligned with position 1295 of the MARC1 gene.

[0091] As provided herein, a MARC1 RNAi agent does not require that the nucleobase at position 1 (5′→3′) of the antisense strand be complementary to the gene, provided that there is at least 85% complementarity (e.g., at least 85, 86, 87, 88, 89, 90, 91, 92, 93, 94, 95, 96, 97, 98, 99, or 100% complementarity) of the antisense strand and the gene across a core stretch sequence of at least 15 consecutive nucleotides. For example, for a MARC1 RNAi agent disclosed herein that is designed to target position 1275 of a MARC1 gene, the 5′ terminal nucleobase of the antisense strand of the of the MARC1 RNAi agent must be aligned with position 1295 of the gene; however, the 5′ terminal nucleobase of the antisense strand may be, but is not required to be, complementary to position 1295 of a MARC1 gene, provided that there is at least 85% complementarity (e.g., at least 85, 86, 87, 88, 89, 90, 91, 92, 93, 94, 95, 96, 97, 98, 99, or 100% complementarity) of the antisense strand and the gene across a core stretch sequence of at least 15 consecutive nucleotides. As shown by, among other things, the examples disclosed herein and as is well known in the art, the specific site of binding of the gene by the antisense strand of the MARC1 RNAi agent (e.g., whether the MARC1 RNAi agent is designed to target a MARC1 gene at position 1275, at position 1190, or at some other position) is important to the level of inhibition achieved by the MARC1 RNAi agent as well as the toxicity profile achieved by the molecule. (See. e.g., Kamola et al., The siRNA Non-seed Region and Its Target Sequences are Auxiliary Determinants of Off-Target Effects. PLOS Computational Biology, 11 (12), FIG. 1 (2015)).

[0092] In some embodiments, the MARC1 RNAi agents disclosed herein target a MARC1 gene at or near the positions of the MARC1 gene sequence shown in Table 1. In some embodiments, the antisense strand of a MARC1 RNAi agent disclosed herein includes a core stretch sequence that is fully, substantially, or at least partially complementary to a target MARC1 19-mer sequence disclosed in Table 1.

TABLE 1
MARC1 19-mer mRNA Target Sequences (taken from homo sapiens MARC1,
mRNA, GenBank NM_022746.4 (SEQ ID NO: 1))

| | | Corresponding | Targeted Gene |
|---|---|---|---|
| | MARC1 19-mer | Positions of | Position |
| SEQ ID | Target Sequences | Sequence | (as referred |
| No. | (5′→3′) | on SEQ ID NO: 1 | to herein) |
| 2 | GGUUUUGGCUUGUGAUCAA | 307-325 | 305 |
| 3 | GUUUUGGCUUGUGAUCAAC | 308-326 | 306 |
| 4 | UUUUGGCUUGUGAUCAACC | 309-327 | 307 |
| 5 | CAGGAGGGAAACAUGGUUA | 327-345 | 325 |
| 6 | UCUCAGUGCAGCCUACACA | 407-425 | 405 |
| 7 | CUCAGUGCAGCCUACACAA | 408-426 | 406 |
| 8 | AGUGCAGCCUACACAAAGG | 411-429 | 409 |
| 9 | UGCAGCCUACACAAAGGAC | 413-431 | 411 |
| 10 | ACACAAAGGACCUACUACU | 421-439 | 419 |
| 11 | UAACCAGCUUCCUGAAGUC | 538-556 | 536 |
| 12 | CCGCCUGGUGCACUUCGAG | 566-584 | 564 |
| 13 | CGCCUGGUGCACUUCGAGC | 567-585 | 565 |
| 14 | GCCUGGUGCACUUCGAGCC | 568-586 | 566 |
| 15 | CCUGGUGCACUUCGAGCCU | 569-587 | 567 |
| 16 | CGUCCUCAUCAAAUAGCAG | 603-621 | 601 |
| 17 | UCAAAUAGCAGACUUGUUC | 611-629 | 609 |
| 18 | CAAAUAGCAGACUUGUUCC | 612-630 | 610 |
| 19 | AAAUAGCAGACUUGUUCCG | 613-631 | 611 |
| 20 | GGACCAGAUUGCUUACUCA | 638-656 | 636 |
| 21 | CAGAUUGCUUACUCAGACA | 642-660 | 640 |
| 22 | UUGCUUACUCAGACACCAG | 646-664 | 644 |
| 23 | GGCUAGAGAAGAAAGUUAA | 712-730 | 710 |
| 24 | AGAGAAGAAAGUUAAAGCA | 716-734 | 714 |
| 25 | AGAAGAAAGUUAAAGCAAC | 718-736 | 716 |
| 26 | GCCCAAUAUUGUAAUUUCA | 746-764 | 744 |
| 27 | CAGGAUGCGAUGUCUAUGC | 763-781 | 761 |
| 28 | UCCAGAUGCAUUUUAACCA | 843-861 | 841 |
| 29 | CUGGAAACACUGAAGAGUU | 903-921 | 901 |
| 30 | ACCCUUCAGAACGAAAGUU | 934-952 | 932 |
| 31 | CCCUUCAGAACGAAAGUUA | 935-953 | 933 |
| 32 | CAGAACGAAAGUUAUAUGG | 940-958 | 938 |
| 33 | GAACGAAAGUUAUAUGGAA | 942-960 | 940 |
| 34 | AAAGUUAUAUGGAAAAUCA | 947-965 | 945 |
| 35 | UGGAAAAUCACCACUCUUU | 956-974 | 954 |
| 36 | GAAAAUCACCACUCUUUGG | 958-976 | 956 |
| 37 | CAAAGUGGGAGACCCUGUG | 1010-1028 | 1008 |
| 38 | AAAGUGGGAGACCCUGUGU | 1011-1029 | 1009 |
| 39 | GUGGGAGACCCUGUGUACC | 1014-1032 | 1012 |
| 40 | UGGGAGACCCUGUGUACCU | 1015-1033 | 1013 |
| 41 | GGGAGACCCUGUGUACCUG | 1016-1034 | 1014 |
| 42 | GUCCUGGAAUAUUAGAUGC | 1059-1077 | 1057 |
| 43 | UCCUGGAAUAUUAGAUGCC | 1060-1078 | 1058 |
| 44 | CCUGGAAUAUUAGAUGCCU | 1061-1079 | 1059 |
| 45 | CUGGAAUAUUAGAUGCCUU | 1062-1080 | 1060 |
| 46 | UCUCAAAAAUGACAACACU | 1091-1109 | 1089 |
| 47 | UGACAACACUUGAAGCAUG | 1100-1118 | 1098 |
| 48 | AACACUUGAAGCAUGGUGU | 1104-1122 | 1102 |
| 49 | GAAGCAUGGUGUUUCAGAA | 1111-1129 | 1109 |
| 50 | AGCAUGGUGUUUCAGAACU | 1113-1131 | 1111 |
| 51 | AGAACUGAGACCUCUACAU | 1126-1144 | 1124 |
| 52 | AGACCUCUACAUUUUCUUU | 1133-1151 | 1131 |
| 53 | UGAUUUUCACAUUUUUCGU | 1159-1177 | 1157 |
| 54 | GUGUCUCAAUGCUUCAAUG | 1192-1210 | 1190 |
| 55 | UCUCAAUGCUUCAAUGUCC | 1195-1213 | 1193 |
| 56 | CUUAGUAGGACUUCAGUAA | 1248-1266 | 1246 |
| 57 | AUGACAAGACAGGAUUCUG | 1276-1294 | 1274 |
| 58 | UGACAAGACAGGAUUCUGA | 1277-1295 | 1275 |
| 59 | GACAAGACAGGAUUCUGAA | 1278-1296 | 1276 |
| 60 | ACAGGAUUCUGAAAACUCC | 1284-1302 | 1282 |
| 61 | CGUUUAACUGAUUAUGGAA | 1304-1322 | 1302 |
| 62 | UGAUUAUGGAAUAGUUCUU | 1312-1330 | 1310 |
| 63 | UUAUGGAAUAGUUCUUUCU | 1315-1333 | 1313 |
| 64 | UAUGGAAUAGUUCUUUCUC | 1316-1334 | 1314 |
| 65 | CCUGCUUCUCCGUUUAUCU | 1334-1352 | 1332 |
| 66 | GAAGAAUAUCCUAGAAUGU | 1434-1452 | 1432 |
| 67 | UUUCCAUAGAUCUGGAUCU | 1607-1625 | 1605 |
| 68 | GCUUCUCAGACAGCAUUGG | 1635-1653 | 1633 |
| 69 | UUCUCAGACAGCAUUGGAU | 1637-1655 | 1635 |
| 70 | ACAGCAUUGGAUUUCCUAA | 1644-1662 | 1642 |
| 71 | CAUUGGAUUUCCUAAAGGU | 1648-1666 | 1646 |
| 72 | UUGGAUUUCCUAAAGGUGC | 1650-1668 | 1648 |
| 73 | ACUGAAAACCUUUAAAGGG | 1819-1837 | 1817 |
| 74 | GGAAAGCAUAUGUCAGUUG | 1844-1862 | 1842 |
| 75 | UGUCAGUUGUUUAAAACCC | 1854-1872 | 1852 |
| 76 | AACUCUAAGAUCUGAUGAA | 1899-1917 | 1897 |
| 77 | ACUCUAAGAUCUGAUGAAG | 1900-1918 | 1898 |
| 78 | UCUAAGAUCUGAUGAAGUA | 1902-1920 | 1900 |
| 79 | AUUGCCAUUUUGUCCUUUG | 1929-1947 | 1927 |
| 80 | CCAUUUUGUCCUUUGAUUA | 1933-1951 | 1931 |
| 81 | GGGAAGUUGACUAAACUUG | 1956-1974 | 1954 |
| 82 | GGAAGUUGACUAAACUUGA | 1957-1975 | 1955 |
| 83 | UGUGAAUAAAUGGAAGCUA | 1992-2010 | 1990 |
| 84 | ACUAGUUUCAGAUCUUACU | 2016-2034 | 2014 |
| 85 | GUUUCAGAUCUUACUAACU | 2020-2038 | 2018 |
| 86 | UUCAGAUCUUACUAACUUC | 2022-2040 | 2020 |
| 87 | GCAUGUGCUUGUUUUAUGG | 2632-2650 | 2630 |
| 88 | GACAAAGCGAAGUGUUCAG | 2781-2799 | 2779 |
| 89 | CCAGUGACCUCUAGAAUCU | 3192-3210 | 3190 |
| 90 | GCAUUUGCACACUAUUCCA | 3334-3352 | 3332 |
| 91 | GACAGAUGUUUGAGAUCAG | 3414-3432 | 3412 |
| 92 | UGUGUGGCAACUUAUGCUG | 3466-3484 | 3464 |
| 93 | GACCAGACCUUGAUUGUGG | 3993-4011 | 3991 |
| 94 | GGAGAAGCACUCUCUUUCU | 4502-4520 | 4500 |
| 95 | AACCAAACUCUCUCUAACC | 4584-4602 | 4582 |
| 96 | CAAACUCUCUCUAACCUUG | 4587-4605 | 4585 |
| 97 | GAUGUAAGUUACAAAACCA | 4625-4643 | 4623 |
| 98 | CCACCUGUGAUGAAAGUGC | 4641-4659 | 4639 |
| 99 | ACUGGUGCAUUUAUAAUCC | 5257-5275 | 5255 |
| 100 | AGCUCUGACUAUAACUCUG | 5851-5869 | 5849 |
| 101 | CCUUUACAGAGCAUCCUAG | 6145-6163 | 6143 |
| 102 | AACUAAGUUAAGUCUAACU | 6296-6314 | 6294 |
| 103 | CAGAGAGAUUGAAUUUACU | 6410-6428 | 6408 |
| 104 | GCUCUGGUUAACAUCAACC | 6539-6557 | 6537 |
| 105 | UGACCUGACAUCAUAGUUU | 6835-6853 | 6833 |
| 106 | AUAAAAUGUAUUAAUGACA | 6959-6977 | 6957 |
| 107 | UCUUAAAGCUAUAUUCUGC | 7210-7228 | 7208 |

[0093] In some embodiments, a MARC1 RNAi agent includes an antisense strand wherein position 19 of the antisense strand (5′>3′) is capable of forming a base pair with position 1 of a 19-mer target sequence disclosed in Table 1. In some embodiments, a MARC1 RNAi agent includes an antisense strand wherein position 1 of the antisense strand (5′→3′) is capable of forming a base pair with position 19 of the 19-mer target sequence disclosed in Table 1.

[0094] In some embodiments, a MARC1 RNAi agent includes an antisense strand wherein position 2 of the antisense strand (5′→3′) is capable of forming a base pair with position 18 of the 19-mer target sequence disclosed in Table 1. In some embodiments, a MARC1 RNAi agent includes an antisense strand wherein positions 2 through 18 of the antisense strand (5′→3′) are capable of forming base pairs with each of the respective complementary bases located at positions 18 through 2 of the 19-mer target sequence disclosed in Table 1.

[0095] For the RNAi agents disclosed herein, the nucleotide at position 1 of the antisense strand (from 5′ end->3′ end) can be perfectly complementary to the MARC1 gene, or can be non-complementary to the MARC1 gene. In some embodiments, the nucleotide at position 1 of the antisense strand (from 5′ end->3′ end) is a U, A, or dT. In some embodiments, the nucleotide at position 1 of the antisense strand (from 5′ end →3′ end) forms an A: U or U: A base pair with the sense strand.

[0096] In some embodiments, a MARC1 RNAi agent antisense strand comprises the sequence of nucleotides (from 5′ end →3′ end) 2-18, 2-19, 2-20, or 2-21 of any of the antisense strand sequences in Table 2 or Table 3. In some embodiments, a MARC1 RNAi sense strand comprises the sequence of nucleotides (from 5′ end->3′ end) 3-21, 2-21, 1-21, 3-20, 2-20, 1-20, 3-19, 2-19, 1-19, 3-18, 2-18, or 1-18 of any of the sense strand sequences in Table 2, Table 4, Table 5, or Table 6D.

[0097] In some embodiments, a MARC1 RNAi agent antisense strand comprises the sequence of nucleotides (from 5′ end->3′ end) 2-18, 2-19, 2-20, or 2-21 of any of the antisense strand sequences of Table 2, or Table 3. In some embodiments, a MARC1 RNAi sense strand comprises the sequence of nucleotides (from 5′ end->3′ end) 3-21, 2-21, 1-21, 3-20, 2-20, 1-20, 3-19, 2-19, 1-19, 3-18, 2-18, or 1-18 of any of the sense strand sequences of Table 2, Table 4, Table 5, or Table 6D.

[0098] In some embodiments, a MARC1 RNAi agent is comprised of (i) an antisense strand comprising the sequence of nucleotides (from 5′ end →3′ end) 2-18 or 2-19 of any of the antisense strand sequences in Table 2, Table 3, or Table 6D, and (ii) a sense strand comprising the sequence of nucleotides (from 5′ end->3′ end) 3-21, 2-21, 1-21, 3-20, 2-20, 1-20, 3-19, 2-19, 1-19, 3-18, 2-18, or 1-18 of any of the sense strand sequences in Table 2, Table 4, Table 5, or Table 6D.

[0099] In some embodiments, a MARC1 RNAi agent is comprised of (i) an antisense strand comprising the sequence of nucleotides (from 5′ end->3′ end) 2-18 or 2-19 of any of the antisense strand sequences of Table 2, Table 3, or Table 6D, and (ii) a sense strand comprising the sequence of nucleotides (from 5′ end →3′ end) 3-21, 2-21, 1-21, 3-20, 2-20, 1-20, 3-19, 2-19, 1-19, 3-18, 2-18, or 1-18 of any of the sense strand sequences of Table 2, Table 4, Table 5, or Table 6D.

[0100] In some embodiments, the MARC1 RNAi agents include core 19-mer nucleotide sequences shown in the following Table 2.

TABLE 2
MARC1 RNAi agent Antisense Strand and Sense Strand Core Stretch Base Sequences
(N = any nucleobase)

| | | | | Corresponding | |
|---|---|---|---|---|---|
| | Antisense Strand Base | | Sense Strand Base | Positions of | |
| SEQ | Sequence (5′→3′) | SEQ | Sequence (5′→3′) | Identified | Targeted |
| ID | (Shown as an Unmodified | ID | (Shown as an Unmodified | Sequence on | Genome |
| NO:. | Nucleotide Sequence) | NO:. | Nucleotide Sequence) | SEQ ID NO: 1 | Position |
| 108 | UUGAUCACAAGCCAAAACC | 582 | GGUUUUGGCUUGUGAUCAA | 307-325 | 305 |
| 109 | AUGAUCACAAGCCAAAACC | 583 | GGUUUUGGCUUGUGAUCAU | 307-325 | 305 |
| 110 | NUGAUCACAAGCCAAAACC | 584 | GGUUUUGGCUUGUGAUCAN | 307-325 | 305 |
| 111 | NUGAUCACAAGCCAAAACN | 585 | NGUUUUGGCUUGUGAUCAN | 307-325 | 305 |
| 112 | GUUGAUCACAAGCCAAAAC | 586 | GUUUUGGCUUGUGAUCAAC | 308-326 | 306 |
| 113 | UUUGAUCACAAGCCAAAAC | 587 | GUUUUGGCUUGUGAUCAAA | 308-326 | 306 |
| 114 | AUUGAUCACAAGCCAAAAC | 588 | GUUUUGGCUUGUGAUCAAU | 308-326 | 306 |
| 115 | NUUGAUCACAAGCCAAAAC | 589 | GUUUUGGCUUGUGAUCAAN | 308-326 | 306 |
| 116 | NUUGAUCACAAGCCAAAAN | 590 | NUUUUGGCUUGUGAUCAAN | 308-326 | 306 |
| 117 | GGUUGAUCACAAGCCAAAA | 591 | UUUUGGCUUGUGAUCAACC | 309-327 | 307 |
| 118 | UGUUGAUCACAAGCCAAAA | 592 | UUUUGGCUUGUGAUCAACA | 309-327 | 307 |
| 119 | AGUUGAUCACAAGCCAAAA | 593 | UUUUGGCUUGUGAUCAACU | 309-327 | 307 |
| 120 | NGUUGAUCACAAGCCAAAA | 594 | UUUUGGCUUGUGAUCAACN | 309-327 | 307 |
| 121 | NGUUGAUCACAAGCCAAAN | 595 | NUUUGGCUUGUGAUCAACN | 309-327 | 307 |
| 122 | UAACCAUGUUUCCCUCCUG | 596 | CAGGAGGGAAACAUGGUUA | 327-345 | 325 |
| 123 | AAACCAUGUUUCCCUCCUG | 597 | CAGGAGGGAAACAUGGUUU | 327-345 | 325 |
| 124 | NAACCAUGUUUCCCUCCUG | 598 | CAGGAGGGAAACAUGGUUN | 327-345 | 325 |
| 125 | NAACCAUGUUUCCCUCCUN | 599 | NAGGAGGGAAACAUGGUUN | 327-345 | 325 |
| 126 | UGUGUAGGCUGCACUGAGA | 600 | UCUCAGUGCAGCCUACACA | 407-425 | 405 |
| 127 | AGUGUAGGCUGCACUGAGA | 601 | UCUCAGUGCAGCCUACACU | 407-425 | 405 |
| 128 | NGUGUAGGCUGCACUGAGA | 602 | UCUCAGUGCAGCCUACACN | 407-425 | 405 |
| 129 | NGUGUAGGCUGCACUGAGN | 603 | NCUCAGUGCAGCCUACACN | 407-425 | 405 |
| 130 | UUGUGUAGGCUGCACUGAG | 604 | CUCAGUGCAGCCUACACAA | 408-426 | 406 |
| 131 | AUGUGUAGGCUGCACUGAG | 605 | CUCAGUGCAGCCUACACAU | 408-426 | 406 |
| 132 | NUGUGUAGGCUGCACUGAG | 606 | CUCAGUGCAGCCUACACAN | 408-426 | 406 |
| 133 | NUGUGUAGGCUGCACUGAN | 607 | NUCAGUGCAGCCUACACAN | 408-426 | 406 |
| 134 | CCUUUGUGUAGGCUGCACU | 608 | AGUGCAGCCUACACAAAGG | 411-429 | 409 |
| 135 | UCUUUGUGUAGGCUGCACU | 609 | AGUGCAGCCUACACAAAGA | 411-429 | 409 |
| 136 | ACUUUGUGUAGGCUGCACU | 610 | AGUGCAGCCUACACAAAGU | 411-429 | 409 |
| 137 | NCUUUGUGUAGGCUGCACU | 611 | AGUGCAGCCUACACAAAGN | 411-429 | 409 |
| 138 | NCUUUGUGUAGGCUGCACN | 612 | NGUGCAGCCUACACAAAGN | 411-429 | 409 |
| 139 | GUCCUUUGUGUAGGCUGCA | 613 | UGCAGCCUACACAAAGGAC | 413-431 | 411 |
| 140 | UUCCUUUGUGUAGGCUGCA | 614 | UGCAGCCUACACAAAGGAA | 413-431 | 411 |
| 141 | AUCCUUUGUGUAGGCUGCA | 615 | UGCAGCCUACACAAAGGAU | 413-431 | 411 |
| 142 | NUCCUUUGUGUAGGCUGCA | 616 | UGCAGCCUACACAAAGGAN | 413-431 | 411 |
| 143 | NUCCUUUGUGUAGGCUGCN | 617 | NGCAGCCUACACAAAGGAN | 413-431 | 411 |
| 144 | AGUAGUAGGUCCUUUGUGU | 618 | ACACAAAGGACCUACUACU | 421-439 | 419 |
| 145 | UGUAGUAGGUCCUUUGUGU | 619 | ACACAAAGGACCUACUACA | 421-439 | 419 |
| 146 | NGUAGUAGGUCCUUUGUGU | 620 | ACACAAAGGACCUACUACN | 421-439 | 419 |
| 147 | NGUAGUAGGUCCUUUGUGN | 621 | NCACAAAGGACCUACUACN | 421-439 | 419 |
| 148 | GACUUCAGGAAGCUGGUUA | 622 | UAACCAGCUUCCUGAAGUC | 538-556 | 536 |
| 149 | UACUUCAGGAAGCUGGUUA | 623 | UAACCAGCUUCCUGAAGUA | 538-556 | 536 |
| 150 | AACUUCAGGAAGCUGGUUA | 624 | UAACCAGCUUCCUGAAGUU | 538-556 | 536 |
| 151 | NACUUCAGGAAGCUGGUUA | 625 | UAACCAGCUUCCUGAAGUN | 538-556 | 536 |
| 152 | NACUUCAGGAAGCUGGUUN | 626 | NAACCAGCUUCCUGAAGUN | 538-556 | 536 |
| 153 | CUCGAAGUGCACCAGGCGG | 627 | CCGCCUGGUGCACUUCGAG | 566-584 | 564 |
| 154 | UUCGAAGUGCACCAGGCGG | 628 | CCGCCUGGUGCACUUCGAA | 566-584 | 564 |
| 155 | AUCGAAGUGCACCAGGCGG | 629 | CCGCCUGGUGCACUUCGAU | 566-584 | 564 |
| 156 | NUCGAAGUGCACCAGGCGG | 630 | CCGCCUGGUGCACUUCGAN | 566-584 | 564 |
| 157 | NUCGAAGUGCACCAGGCGN | 631 | NCGCCUGGUGCACUUCGAN | 566-584 | 564 |
| 158 | GCUCGAAGUGCACCAGGCG | 632 | CGCCUGGUGCACUUCGAGC | 567-585 | 565 |
| 159 | UCUCGAAGUGCACCAGGCG | 633 | CGCCUGGUGCACUUCGAGA | 567-585 | 565 |
| 160 | ACUCGAAGUGCACCAGGCG | 634 | CGCCUGGUGCACUUCGAGU | 567-585 | 565 |
| 161 | NCUCGAAGUGCACCAGGCG | 635 | CGCCUGGUGCACUUCGAGN | 567-585 | 565 |
| 162 | NCUCGAAGUGCACCAGGCN | 636 | NGCCUGGUGCACUUCGAGN | 567-585 | 565 |
| 163 | GGCUCGAAGUGCACCAGGC | 637 | GCCUGGUGCACUUCGAGCC | 568-586 | 566 |
| 164 | UGCUCGAAGUGCACCAGGC | 638 | GCCUGGUGCACUUCGAGCA | 568-586 | 566 |
| 165 | AGCUCGAAGUGCACCAGGC | 639 | GCCUGGUGCACUUCGAGCU | 568-586 | 566 |
| 166 | NGCUCGAAGUGCACCAGGC | 640 | GCCUGGUGCACUUCGAGCN | 568-586 | 566 |
| 167 | NGCUCGAAGUGCACCAGGN | 641 | NCCUGGUGCACUUCGAGCN | 568-586 | 566 |
| 168 | AGGCUCGAAGUGCACCAGG | 642 | CCUGGUGCACUUCGAGCCU | 569-587 | 567 |
| 169 | UGGCUCGAAGUGCACCAGG | 643 | CCUGGUGCACUUCGAGCCA | 569-587 | 567 |
| 170 | NGGCUCGAAGUGCACCAGG | 644 | CCUGGUGCACUUCGAGCCN | 569-587 | 567 |
| 171 | NGGCUCGAAGUGCACCAGN | 645 | NCUGGUGCACUUCGAGCCN | 569-587 | 567 |
| 172 | CUGCUAUUUGAUGAGGACG | 646 | CGUCCUCAUCAAAUAGCAG | 603-621 | 601 |
| 173 | UUGCUAUUUGAUGAGGACG | 647 | CGUCCUCAUCAAAUAGCAA | 603-621 | 601 |
| 174 | AUGCUAUUUGAUGAGGACG | 648 | CGUCCUCAUCAAAUAGCAU | 603-621 | 601 |
| 175 | NUGCUAUUUGAUGAGGACG | 649 | CGUCCUCAUCAAAUAGCAN | 603-621 | 601 |
| 176 | NUGCUAUUUGAUGAGGACN | 650 | NGUCCUCAUCAAAUAGCAN | 603-621 | 601 |
| 177 | GAACAAGUCUGCUAUUUGA | 651 | UCAAAUAGCAGACUUGUUC | 611-629 | 609 |
| 178 | UAACAAGUCUGCUAUUUGA | 652 | UCAAAUAGCAGACUUGUUA | 611-629 | 609 |
| 179 | AAACAAGUCUGCUAUUUGA | 653 | UCAAAUAGCAGACUUGUUU | 611-629 | 609 |
| 180 | NAACAAGUCUGCUAUUUGA | 654 | UCAAAUAGCAGACUUGUUN | 611-629 | 609 |
| 181 | NAACAAGUCUGCUAUUUGN | 655 | NCAAAUAGCAGACUUGUUN | 611-629 | 609 |
| 182 | GGAACAAGUCUGCUAUUUG | 656 | CAAAUAGCAGACUUGUUCC | 612-630 | 610 |
| 183 | UGAACAAGUCUGCUAUUUG | 657 | CAAAUAGCAGACUUGUUCA | 612-630 | 610 |
| 184 | AGAACAAGUCUGCUAUUUG | 658 | CAAAUAGCAGACUUGUUCU | 612-630 | 610 |
| 185 | NGAACAAGUCUGCUAUUUG | 659 | CAAAUAGCAGACUUGUUCN | 612-630 | 610 |
| 186 | NGAACAAGUCUGCUAUUUN | 660 | NAAAUAGCAGACUUGUUCN | 612-630 | 610 |
| 187 | CGGAACAAGUCUGCUAUUU | 661 | AAAUAGCAGACUUGUUCCG | 613-631 | 611 |
| 188 | UGGAACAAGUCUGCUAUUU | 662 | AAAUAGCAGACUUGUUCCA | 613-631 | 611 |
| 189 | AGGAACAAGUCUGCUAUUU | 663 | AAAUAGCAGACUUGUUCCU | 613-631 | 611 |
| 190 | NGGAACAAGUCUGCUAUUU | 664 | AAAUAGCAGACUUGUUCCN | 613-631 | 611 |
| 191 | NGGAACAAGUCUGCUAUUN | 665 | NAAUAGCAGACUUGUUCCN | 613-631 | 611 |
| 192 | UGAGUAAGCAAUCUGGUCC | 666 | GGACCAGAUUGCUUACUCA | 638-656 | 636 |
| 193 | AGAGUAAGCAAUCUGGUCC | 667 | GGACCAGAUUGCUUACUCU | 638-656 | 636 |
| 194 | NGAGUAAGCAAUCUGGUCC | 668 | GGACCAGAUUGCUUACUCN | 638-656 | 636 |
| 195 | NGAGUAAGCAAUCUGGUCN | 669 | NGACCAGAUUGCUUACUCN | 638-656 | 636 |
| 196 | UGUCUGAGUAAGCAAUCUG | 670 | CAGAUUGCUUACUCAGACA | 642-660 | 640 |
| 197 | AGUCUGAGUAAGCAAUCUG | 671 | CAGAUUGCUUACUCAGACU | 642-660 | 640 |
| 198 | NGUCUGAGUAAGCAAUCUG | 672 | CAGAUUGCUUACUCAGACN | 642-660 | 640 |
| 199 | NGUCUGAGUAAGCAAUCUN | 673 | NAGAUUGCUUACUCAGACN | 642-660 | 640 |
| 200 | CUGGUGUCUGAGUAAGCAA | 674 | UUGCUUACUCAGACACCAG | 646-664 | 644 |
| 201 | UUGGUGUCUGAGUAAGCAA | 675 | UUGCUUACUCAGACACCAA | 646-664 | 644 |
| 202 | AUGGUGUCUGAGUAAGCAA | 676 | UUGCUUACUCAGACACCAU | 646-664 | 644 |
| 203 | NUGGUGUCUGAGUAAGCAA | 677 | UUGCUUACUCAGACACCAN | 646-664 | 644 |
| 204 | NUGGUGUCUGAGUAAGCAN | 678 | NUGCUUACUCAGACACCAN | 646-664 | 644 |
| 205 | UUAACUUUCUUCUCUAGCC | 679 | GGCUAGAGAAGAAAGUUAA | 712-730 | 710 |
| 206 | AUAACUUUCUUCUCUAGCC | 680 | GGCUAGAGAAGAAAGUUAU | 712-730 | 710 |
| 207 | NUAACUUUCUUCUCUAGCC | 681 | GGCUAGAGAAGAAAGUUAN | 712-730 | 710 |
| 208 | NUAACUUUCUUCUCUAGCN | 682 | NGCUAGAGAAGAAAGUUAN | 712-730 | 710 |
| 209 | UGCUUUAACUUUCUUCUCU | 683 | AGAGAAGAAAGUUAAAGCA | 716-734 | 714 |
| 210 | AGCUUUAACUUUCUUCUCU | 684 | AGAGAAGAAAGUUAAAGCU | 716-734 | 714 |
| 211 | NGCUUUAACUUUCUUCUCU | 685 | AGAGAAGAAAGUUAAAGCN | 716-734 | 714 |
| 212 | NGCUUUAACUUUCUUCUCN | 686 | NGAGAAGAAAGUUAAAGCN | 716-734 | 714 |
| 213 | GUUGCUUUAACUUUCUUCU | 687 | AGAAGAAAGUUAAAGCAAC | 718-736 | 716 |
| 214 | UUUGCUUUAACUUUCUUCU | 688 | AGAAGAAAGUUAAAGCAAA | 718-736 | 716 |
| 215 | AUUGCUUUAACUUUCUUCU | 689 | AGAAGAAAGUUAAAGCAAU | 718-736 | 716 |
| 216 | NUUGCUUUAACUUUCUUCU | 690 | AGAAGAAAGUUAAAGCAAN | 718-736 | 716 |
| 217 | NUUGCUUUAACUUUCUUCN | 691 | NGAAGAAAGUUAAAGCAAN | 718-736 | 716 |
| 218 | UGAAAUUACAAUAUUGGGC | 692 | GCCCAAUAUUGUAAUUUCA | 746-764 | 744 |
| 219 | AGAAAUUACAAUAUUGGGC | 693 | GCCCAAUAUUGUAAUUUCU | 746-764 | 744 |
| 220 | NGAAAUUACAAUAUUGGGC | 694 | GCCCAAUAUUGUAAUUUCN | 746-764 | 744 |
| 221 | NGAAAUUACAAUAUUGGGN | 695 | NCCCAAUAUUGUAAUUUCN | 746-764 | 744 |
| 222 | GCAUAGACAUCGCAUCCUG | 696 | CAGGAUGCGAUGUCUAUGC | 763-781 | 761 |
| 223 | UCAUAGACAUCGCAUCCUG | 697 | CAGGAUGCGAUGUCUAUGA | 763-781 | 761 |
| 224 | ACAUAGACAUCGCAUCCUG | 698 | CAGGAUGCGAUGUCUAUGU | 763-781 | 761 |
| 225 | NCAUAGACAUCGCAUCCUG | 699 | CAGGAUGCGAUGUCUAUGN | 763-781 | 761 |
| 226 | NCAUAGACAUCGCAUCCUN | 700 | NAGGAUGCGAUGUCUAUGN | 763-781 | 761 |
| 227 | UGGUUAAAAUGCAUCUGGA | 701 | UCCAGAUGCAUUUUAACCA | 843-861 | 841 |
| 228 | AGGUUAAAAUGCAUCUGGA | 702 | UCCAGAUGCAUUUUAACCU | 843-861 | 841 |
| 229 | NGGUUAAAAUGCAUCUGGA | 703 | UCCAGAUGCAUUUUAACCN | 843-861 | 841 |
| 230 | NGGUUAAAAUGCAUCUGGN | 704 | NCCAGAUGCAUUUUAACCN | 843-861 | 841 |
| 231 | AACUCUUCAGUGUUUCCAG | 705 | CUGGAAACACUGAAGAGUU | 903-921 | 901 |
| 232 | UACUCUUCAGUGUUUCCAG | 706 | CUGGAAACACUGAAGAGUA | 903-921 | 901 |
| 233 | NACUCUUCAGUGUUUCCAG | 707 | CUGGAAACACUGAAGAGUN | 903-921 | 901 |
| 234 | NACUCUUCAGUGUUUCCAN | 708 | NUGGAAACACUGAAGAGUN | 903-921 | 901 |
| 235 | AACUUUCGUUCUGAAGGGU | 709 | ACCCUUCAGAACGAAAGUU | 934-952 | 932 |
| 236 | UACUUUCGUUCUGAAGGGU | 710 | ACCCUUCAGAACGAAAGUA | 934-952 | 932 |
| 237 | NACUUUCGUUCUGAAGGGU | 711 | ACCCUUCAGAACGAAAGUN | 934-952 | 932 |
| 238 | NACUUUCGUUCUGAAGGGN | 712 | NCCCUUCAGAACGAAAGUN | 934-952 | 932 |
| 239 | UAACUUUCGUUCUGAAGGG | 713 | CCCUUCAGAACGAAAGUUA | 935-953 | 933 |
| 240 | AAACUUUCGUUCUGAAGGG | 714 | CCCUUCAGAACGAAAGUUU | 935-953 | 933 |
| 241 | NAACUUUCGUUCUGAAGGG | 715 | CCCUUCAGAACGAAAGUUN | 935-953 | 933 |
| 242 | NAACUUUCGUUCUGAAGGN | 716 | NCCUUCAGAACGAAAGUUN | 935-953 | 933 |
| 243 | CCAUAUAACUUUCGUUCUG | 717 | CAGAACGAAAGUUAUAUGG | 940-958 | 938 |
| 244 | UCAUAUAACUUUCGUUCUG | 718 | CAGAACGAAAGUUAUAUGA | 940-958 | 938 |
| 245 | ACAUAUAACUUUCGUUCUG | 719 | CAGAACGAAAGUUAUAUGU | 940-958 | 938 |
| 246 | NCAUAUAACUUUCGUUCUG | 720 | CAGAACGAAAGUUAUAUGN | 940-958 | 938 |
| 247 | NCAUAUAACUUUCGUUCUN | 721 | NAGAACGAAAGUUAUAUGN | 940-958 | 938 |
| 248 | UUCCAUAUAACUUUCGUUC | 722 | GAACGAAAGUUAUAUGGAA | 942-960 | 940 |
| 249 | AUCCAUAUAACUUUCGUUC | 723 | GAACGAAAGUUAUAUGGAU | 942-960 | 940 |
| 250 | NUCCAUAUAACUUUCGUUC | 724 | GAACGAAAGUUAUAUGGAN | 942-960 | 940 |
| 251 | NUCCAUAUAACUUUCGUUN | 725 | NAACGAAAGUUAUAUGGAN | 942-960 | 940 |
| 252 | UGAUUUUCCAUAUAACUUU | 726 | AAAGUUAUAUGGAAAAUCA | 947-965 | 945 |
| 253 | AGAUUUUCCAUAUAACUUU | 727 | AAAGUUAUAUGGAAAAUCU | 947-965 | 945 |
| 254 | NGAUUUUCCAUAUAACUUU | 728 | AAAGUUAUAUGGAAAAUCN | 947-965 | 945 |
| 255 | NGAUUUUCCAUAUAACUUN | 729 | NAAGUUAUAUGGAAAAUCN | 947-965 | 945 |
| 256 | AAAGAGUGGUGAUUUUCCA | 730 | UGGAAAAUCACCACUCUUU | 956-974 | 954 |
| 257 | UAAGAGUGGUGAUUUUCCA | 731 | UGGAAAAUCACCACUCUUA | 956-974 | 954 |
| 258 | NAAGAGUGGUGAUUUUCCA | 732 | UGGAAAAUCACCACUCUUN | 956-974 | 954 |
| 259 | NAAGAGUGGUGAUUUUCCN | 733 | NGGAAAAUCACCACUCUUN | 956-974 | 954 |
| 260 | CCAAAGAGUGGUGAUUUUC | 734 | GAAAAUCACCACUCUUUGG | 958-976 | 956 |
| 261 | UCAAAGAGUGGUGAUUUUC | 735 | GAAAAUCACCACUCUUUGA | 958-976 | 956 |
| 262 | ACAAAGAGUGGUGAUUUUC | 736 | GAAAAUCACCACUCUUUGU | 958-976 | 956 |
| 263 | NCAAAGAGUGGUGAUUUUC | 737 | GAAAAUCACCACUCUUUGN | 958-976 | 956 |
| 264 | NCAAAGAGUGGUGAUUUUN | 738 | NAAAAUCACCACUCUUUGN | 958-976 | 956 |
| 265 | CACAGGGUCUCCCACUUUG | 739 | CAAAGUGGGAGACCCUGUG | 1010-1028 | 1008 |
| 266 | UACAGGGUCUCCCACUUUG | 740 | CAAAGUGGGAGACCCUGUA | 1010-1028 | 1008 |
| 267 | AACAGGGUCUCCCACUUUG | 741 | CAAAGUGGGAGACCCUGUU | 1010-1028 | 1008 |
| 268 | NACAGGGUCUCCCACUUUG | 742 | CAAAGUGGGAGACCCUGUN | 1010-1028 | 1008 |
| 269 | NACAGGGUCUCCCACUUUN | 743 | NAAAGUGGGAGACCCUGUN | 1010-1028 | 1008 |
| 270 | ACACAGGGUCUCCCACUUU | 744 | AAAGUGGGAGACCCUGUGU | 1011-1029 | 1009 |
| 271 | UCACAGGGUCUCCCACUUU | 745 | AAAGUGGGAGACCCUGUGA | 1011-1029 | 1009 |
| 272 | NCACAGGGUCUCCCACUUU | 746 | AAAGUGGGAGACCCUGUGN | 1011-1029 | 1009 |
| 273 | NCACAGGGUCUCCCACUUN | 747 | NAAGUGGGAGACCCUGUGN | 1011-1029 | 1009 |
| 274 | GGUACACAGGGUCUCCCAC | 748 | GUGGGAGACCCUGUGUACC | 1014-1032 | 1012 |
| 275 | UGUACACAGGGUCUCCCAC | 749 | GUGGGAGACCCUGUGUACA | 1014-1032 | 1012 |
| 276 | AGUACACAGGGUCUCCCAC | 750 | GUGGGAGACCCUGUGUACU | 1014-1032 | 1012 |
| 277 | NGUACACAGGGUCUCCCAC | 751 | GUGGGAGACCCUGUGUACN | 1014-1032 | 1012 |
| 278 | NGUACACAGGGUCUCCCAN | 752 | NUGGGAGACCCUGUGUACN | 1014-1032 | 1012 |
| 279 | AGGUACACAGGGUCUCCCA | 753 | UGGGAGACCCUGUGUACCU | 1015-1033 | 1013 |
| 280 | UGGUACACAGGGUCUCCCA | 754 | UGGGAGACCCUGUGUACCA | 1015-1033 | 1013 |
| 281 | NGGUACACAGGGUCUCCCA | 755 | UGGGAGACCCUGUGUACCN | 1015-1033 | 1013 |
| 282 | NGGUACACAGGGUCUCCCN | 756 | NGGGAGACCCUGUGUACCN | 1015-1033 | 1013 |
| 283 | CAGGUACACAGGGUCUCCC | 757 | GGGAGACCCUGUGUACCUG | 1016-1034 | 1014 |
| 284 | UAGGUACACAGGGUCUCCC | 758 | GGGAGACCCUGUGUACCUA | 1016-1034 | 1014 |
| 285 | AAGGUACACAGGGUCUCCC | 759 | GGGAGACCCUGUGUACCUU | 1016-1034 | 1014 |
| 286 | NAGGUACACAGGGUCUCCC | 760 | GGGAGACCCUGUGUACCUN | 1016-1034 | 1014 |
| 287 | NAGGUACACAGGGUCUCCN | 761 | NGGAGACCCUGUGUACCUN | 1016-1034 | 1014 |
| 288 | GCAUCUAAUAUUCCAGGAC | 762 | GUCCUGGAAUAUUAGAUGC | 1059-1077 | 1057 |
| 289 | UCAUCUAAUAUUCCAGGAC | 763 | GUCCUGGAAUAUUAGAUGA | 1059-1077 | 1057 |
| 290 | ACAUCUAAUAUUCCAGGAC | 764 | GUCCUGGAAUAUUAGAUGU | 1059-1077 | 1057 |
| 291 | NCAUCUAAUAUUCCAGGAC | 765 | GUCCUGGAAUAUUAGAUGN | 1059-1077 | 1057 |
| 292 | NCAUCUAAUAUUCCAGGAN | 766 | NUCCUGGAAUAUUAGAUGN | 1059-1077 | 1057 |
| 293 | GGCAUCUAAUAUUCCAGGA | 767 | UCCUGGAAUAUUAGAUGCC | 1060-1078 | 1058 |
| 294 | AGCAUCUAAUAUUCCAGGA | 768 | UCCUGGAAUAUUAGAUGCU | 1060-1078 | 1058 |
| 295 | UGCAUCUAAUAUUCCAGGA | 769 | UCCUGGAAUAUUAGAUGCA | 1060-1078 | 1058 |
| 296 | NGCAUCUAAUAUUCCAGGA | 770 | UCCUGGAAUAUUAGAUGCN | 1060-1078 | 1058 |
| 297 | NGCAUCUAAUAUUCCAGGN | 771 | NCCUGGAAUAUUAGAUGEN | 1060-1078 | 1058 |
| 298 | AGGCAUCUAAUAUUCCAGG | 772 | CCUGGAAUAUUAGAUGCCU | 1061-1079 | 1059 |
| 299 | UGGCAUCUAAUAUUCCAGG | 773 | CCUGGAAUAUUAGAUGCCA | 1061-1079 | 1059 |
| 300 | NGGCAUCUAAUAUUCCAGG | 774 | CCUGGAAUAUUAGAUGCCN | 1061-1079 | 1059 |
| 301 | NGGCAUCUAAUAUUCCAGN | 775 | NCUGGAAUAUUAGAUGCCN | 1061-1079 | 1059 |
| 302 | AAGGCAUCUAAUAUUCCAG | 776 | CUGGAAUAUUAGAUGCCUU | 1062-1080 | 1060 |
| 303 | UAGGCAUCUAAUAUUCCAG | 777 | CUGGAAUAUUAGAUGCCUA | 1062-1080 | 1060 |
| 304 | NAGGCAUCUAAUAUUCCAG | 778 | CUGGAAUAUUAGAUGCCUN | 1062-1080 | 1060 |
| 305 | NAGGCAUCUAAUAUUCCAN | 779 | NUGGAAUAUUAGAUGCCUN | 1062-1080 | 1060 |
| 306 | AGUGUUGUCAUUUUUGAGA | 780 | UCUCAAAAAUGACAACACU | 1091-1109 | 1089 |
| 307 | UGUGUUGUCAUUUUUGAGA | 781 | UCUCAAAAAUGACAACACA | 1091-1109 | 1089 |
| 308 | NGUGUUGUCAUUUUUGAGA | 782 | UCUCAAAAAUGACAACACN | 1091-1109 | 1089 |
| 309 | NGUGUUGUCAUUUUUGAGN | 783 | NCUCAAAAAUGACAACACN | 1091-1109 | 1089 |
| 310 | CAUGCUUCAAGUGUUGUCA | 784 | UGACAACACUUGAAGCAUG | 1100-1118 | 1098 |
| 311 | UAUGCUUCAAGUGUUGUCA | 785 | UGACAACACUUGAAGCAUA | 1100-1118 | 1098 |
| 312 | AAUGCUUCAAGUGUUGUCA | 786 | UGACAACACUUGAAGCAUU | 1100-1118 | 1098 |
| 313 | NAUGCUUCAAGUGUUGUCA | 787 | UGACAACACUUGAAGCAUN | 1100-1118 | 1098 |
| 314 | NAUGCUUCAAGUGUUGUCN | 788 | NGACAACACUUGAAGCAUN | 1100-1118 | 1098 |
| 315 | ACACCAUGCUUCAAGUGUU | 789 | AACACUUGAAGCAUGGUGU | 1104-1122 | 1102 |
| 316 | UCACCAUGCUUCAAGUGUU | 790 | AACACUUGAAGCAUGGUGA | 1104-1122 | 1102 |
| 317 | NCACCAUGCUUCAAGUGUU | 791 | AACACUUGAAGCAUGGUGN | 1104-1122 | 1102 |
| 318 | NCACCAUGCUUCAAGUGUN | 792 | AACACUUGAAGCAUGGUGN | 1104-1122 | 1102 |
| 319 | UUCUGAAACACCAUGCUUC | 793 | GAAGCAUGGUGUUUCAGAA | 1111-1129 | 1109 |
| 320 | AUCUGAAACACCAUGCUUC | 794 | GAAGCAUGGUGUUUCAGAU | 1111-1129 | 1109 |
| 321 | NUCUGAAACACCAUGCUUC | 795 | GAAGCAUGGUGUUUCAGAN | 1111-1129 | 1109 |
| 322 | NUCUGAAACACCAUGCUUN | 796 | NAAGCAUGGUGUUUCAGAN | 1111-1129 | 1109 |
| 323 | AGUUCUGAAACACCAUGCU | 797 | AGCAUGGUGUUUCAGAACU | 1113-1131 | 1111 |
| 324 | UGUUCUGAAACACCAUGCU | 798 | AGCAUGGUGUUUCAGAACA | 1113-1131 | 1111 |
| 325 | NGUUCUGAAACACCAUGCU | 799 | AGCAUGGUGUUUCAGAACN | 1113-1131 | 1111 |
| 326 | NGUUCUGAAACACCAUGEN | 800 | NGCAUGGUGUUUCAGAACN | 1113-1131 | 1111 |
| 327 | AUGUAGAGGUCUCAGUUCU | 801 | AGAACUGAGACCUCUACAU | 1126-1144 | 1124 |
| 328 | UUGUAGAGGUCUCAGUUCU | 802 | AGAACUGAGACCUCUACAA | 1126-1144 | 1124 |
| 329 | NUGUAGAGGUCUCAGUUCU | 803 | AGAACUGAGACCUCUACAN | 1126-1144 | 1124 |
| 330 | NUGUAGAGGUCUCAGUUCN | 804 | NGAACUGAGACCUCUACAN | 1126-1144 | 1124 |
| 331 | AAAGAAAAUGUAGAGGUCU | 805 | AGACCUCUACAUUUUCUUU | 1133-1151 | 1131 |
| 332 | UAAGAAAAUGUAGAGGUCU | 806 | AGACCUCUACAUUUUCUUA | 1133-1151 | 1131 |
| 333 | NAAGAAAAUGUAGAGGUCU | 807 | AGACCUCUACAUUUUCUUN | 1133-1151 | 1131 |
| 334 | NAAGAAAAUGUAGAGGUCN | 808 | NGACCUCUACAUUUUCUUN | 1133-1151 | 1131 |
| 335 | ACGAAAAAUGUGAAAAUCA | 809 | UGAUUUUCACAUUUUUCGU | 1159-1177 | 1157 |
| 336 | UCGAAAAAUGUGAAAAUCA | 810 | UGAUUUUCACAUUUUUCGA | 1159-1177 | 1157 |
| 337 | NCGAAAAAUGUGAAAAUCA | 811 | UGAUUUUCACAUUUUUCGN | 1159-1177 | 1157 |
| 338 | NCGAAAAAUGUGAAAAUCN | 812 | NGAUUUUCACAUUUUUCGN | 1159-1177 | 1157 |
| 339 | CAUUGAAGCAUUGAGACAC | 813 | GUGUCUCAAUGCUUCAAUG | 1192-1210 | 1190 |
| 340 | UAUUGAAGCAUUGAGACAC | 814 | GUGUCUCAAUGCUUCAAUA | 1192-1210 | 1190 |
| 341 | AAUUGAAGCAUUGAGACAC | 815 | GUGUCUCAAUGCUUCAAUU | 1192-1210 | 1190 |
| 342 | NAUUGAAGCAUUGAGACAC | 816 | GUGUCUCAAUGCUUCAAUN | 1192-1210 | 1190 |
| 343 | NAUUGAAGCAUUGAGACAN | 817 | NUGUCUCAAUGCUUCAAUN | 1192-1210 | 1190 |
| 344 | GGACAUUGAAGCAUUGAGA | 818 | UCUCAAUGCUUCAAUGUCC | 1195-1213 | 1193 |
| 345 | UGACAUUGAAGCAUUGAGA | 819 | UCUCAAUGCUUCAAUGUCA | 1195-1213 | 1193 |
| 346 | AGACAUUGAAGCAUUGAGA | 820 | UCUCAAUGCUUCAAUGUCU | 1195-1213 | 1193 |
| 347 | NGACAUUGAAGCAUUGAGA | 821 | UCUCAAUGCUUCAAUGUCN | 1195-1213 | 1193 |
| 348 | NGACAUUGAAGCAUUGAGN | 822 | NCUCAAUGCUUCAAUGUCN | 1195-1213 | 1193 |
| 349 | UUACUGAAGUCCUACUAAG | 823 | CUUAGUAGGACUUCAGUAA | 1248-1266 | 1246 |
| 350 | AUACUGAAGUCCUACUAAG | 824 | CUUAGUAGGACUUCAGUAU | 1248-1266 | 1246 |
| 351 | NUACUGAAGUCCUACUAAG | 825 | CUUAGUAGGACUUCAGUAN | 1248-1266 | 1246 |
| 352 | NUACUGAAGUCCUACUAAN | 826 | NUUAGUAGGACUUCAGUAN | 1248-1266 | 1246 |
| 353 | CAGAAUCCUGUCUUGUCAU | 827 | AUGACAAGACAGGAUUCUG | 1276-1294 | 1274 |
| 354 | UAGAAUCCUGUCUUGUCAU | 828 | AUGACAAGACAGGAUUCUA | 1276-1294 | 1274 |
| 355 | AAGAAUCCUGUCUUGUCAU | 829 | AUGACAAGACAGGAUUCUU | 1276-1294 | 1274 |
| 356 | NAGAAUCCUGUCUUGUCAU | 830 | AUGACAAGACAGGAUUCUN | 1276-1294 | 1274 |
| 357 | NAGAAUCCUGUCUUGUCAN | 831 | NUGACAAGACAGGAUUCUN | 1276-1294 | 1274 |
| 358 | UCAGAAUCCUGUCUUGUCA | 832 | UGACAAGACAGGAUUCUGA | 1277-1295 | 1275 |
| 359 | ACAGAAUCCUGUCUUGUCA | 833 | UGACAAGACAGGAUUCUGU | 1277-1295 | 1275 |
| 360 | NCAGAAUCCUGUCUUGUCA | 834 | UGACAAGACAGGAUUCUGN | 1277-1295 | 1275 |
| 361 | NCAGAAUCCUGUCUUGUCN | 835 | NGACAAGACAGGAUUCUGN | 1277-1295 | 1275 |
| 362 | UUCAGAAUCCUGUCUUGUC | 836 | GACAAGACAGGAUUCUGAA | 1278-1296 | 1276 |
| 363 | AUCAGAAUCCUGUCUUGUC | 837 | GACAAGACAGGAUUCUGAU | 1278-1296 | 1276 |
| 364 | NUCAGAAUCCUGUCUUGUC | 838 | GACAAGACAGGAUUCUGAN | 1278-1296 | 1276 |
| 365 | NUCAGAAUCCUGUCUUGUN | 839 | NACAAGACAGGAUUCUGAN | 1278-1296 | 1276 |
| 366 | GGAGUUUUCAGAAUCCUGU | 840 | ACAGGAUUCUGAAAACUCC | 1284-1302 | 1282 |
| 367 | UGAGUUUUCAGAAUCCUGU | 841 | ACAGGAUUCUGAAAACUCA | 1284-1302 | 1282 |
| 368 | AGAGUUUUCAGAAUCCUGU | 842 | ACAGGAUUCUGAAAACUCU | 1284-1302 | 1282 |
| 369 | NGAGUUUUCAGAAUCCUGU | 843 | ACAGGAUUCUGAAAACUCN | 1284-1302 | 1282 |
| 370 | NGAGUUUUCAGAAUCCUGN | 844 | NCAGGAUUCUGAAAACUCN | 1284-1302 | 1282 |
| 371 | UUCCAUAAUCAGUUAAACG | 845 | CGUUUAACUGAUUAUGGAA | 1304-1322 | 1302 |
| 372 | AUCCAUAAUCAGUUAAACG | 846 | CGUUUAACUGAUUAUGGAU | 1304-1322 | 1302 |
| 373 | NUCCAUAAUCAGUUAAACG | 847 | CGUUUAACUGAUUAUGGAN | 1304-1322 | 1302 |
| 374 | NUCCAUAAUCAGUUAAACN | 848 | NGUUUAACUGAUUAUGGAN | 1304-1322 | 1302 |
| 375 | AAGAACUAUUCCAUAAUCA | 849 | UGAUUAUGGAAUAGUUCUU | 1312-1330 | 1310 |
| 376 | UAGAACUAUUCCAUAAUCA | 850 | UGAUUAUGGAAUAGUUCUA | 1312-1330 | 1310 |
| 377 | NAGAACUAUUCCAUAAUCA | 851 | UGAUUAUGGAAUAGUUCUN | 1312-1330 | 1310 |
| 378 | NAGAACUAUUCCAUAAUCN | 852 | NGAUUAUGGAAUAGUUCUN | 1312-1330 | 1310 |
| 379 | AGAAAGAACUAUUCCAUAA | 853 | UUAUGGAAUAGUUCUUUCU | 1315-1333 | 1313 |
| 380 | UGAAAGAACUAUUCCAUAA | 854 | UUAUGGAAUAGUUCUUUCA | 1315-1333 | 1313 |
| 381 | NGAAAGAACUAUUCCAUAA | 855 | UUAUGGAAUAGUUCUUUCN | 1315-1333 | 1313 |
| 382 | NGAAAGAACUAUUCCAUAN | 856 | NUAUGGAAUAGUUCUUUCN | 1315-1333 | 1313 |
| 383 | GAGAAAGAACUAUUCCAUA | 857 | UAUGGAAUAGUUCUUUCUC | 1316-1334 | 1314 |
| 384 | UAGAAAGAACUAUUCCAUA | 858 | UAUGGAAUAGUUCUUUCUA | 1316-1334 | 1314 |
| 385 | AAGAAAGAACUAUUCCAUA | 859 | UAUGGAAUAGUUCUUUCUU | 1316-1334 | 1314 |
| 386 | NAGAAAGAACUAUUCCAUA | 860 | UAUGGAAUAGUUCUUUCUN | 1316-1334 | 1314 |
| 387 | NAGAAAGAACUAUUCCAUN | 861 | NAUGGAAUAGUUCUUUCUN | 1316-1334 | 1314 |
| 388 | AGAUAAACGGAGAAGCAGG | 862 | CCUGCUUCUCCGUUUAUCU | 1334-1352 | 1332 |
| 389 | UGAUAAACGGAGAAGCAGG | 863 | CCUGCUUCUCCGUUUAUCA | 1334-1352 | 1332 |
| 390 | NGAUAAACGGAGAAGCAGG | 864 | CCUGCUUCUCCGUUUAUCN | 1334-1352 | 1332 |
| 391 | NGAUAAACGGAGAAGCAGN | 865 | NCUGCUUCUCCGUUUAUCN | 1334-1352 | 1332 |
| 392 | ACAUUCUAGGAUAUUCUUC | 866 | GAAGAAUAUCCUAGAAUGU | 1434-1452 | 1432 |
| 393 | UCAUUCUAGGAUAUUCUUC | 867 | GAAGAAUAUCCUAGAAUGA | 1434-1452 | 1432 |
| 394 | NCAUUCUAGGAUAUUCUUC | 868 | GAAGAAUAUCCUAGAAUGN | 1434-1452 | 1432 |
| 395 | NCAUUCUAGGAUAUUCUUN | 869 | NAAGAAUAUCCUAGAAUGN | 1434-1452 | 1432 |
| 396 | AGAUCCAGAUCUAUGGAAA | 870 | UUUCCAUAGAUCUGGAUCU | 1607-1625 | 1605 |
| 397 | UGAUCCAGAUCUAUGGAAA | 871 | UUUCCAUAGAUCUGGAUCA | 1607-1625 | 1605 |
| 398 | NGAUCCAGAUCUAUGGAAA | 872 | UUUCCAUAGAUCUGGAUCN | 1607-1625 | 1605 |
| 399 | NGAUCCAGAUCUAUGGAAN | 873 | NUUCCAUAGAUCUGGAUCN | 1607-1625 | 1605 |
| 400 | CCAAUGCUGUCUGAGAAGC | 874 | GCUUCUCAGACAGCAUUGG | 1635-1653 | 1633 |
| 401 | UCAAUGCUGUCUGAGAAGC | 875 | GCUUCUCAGACAGCAUUGA | 1635-1653 | 1633 |
| 402 | ACAAUGCUGUCUGAGAAGC | 876 | GCUUCUCAGACAGCAUUGU | 1635-1653 | 1633 |
| 403 | NCAAUGCUGUCUGAGAAGC | 877 | GCUUCUCAGACAGCAUUGN | 1635-1653 | 1633 |
| 404 | NCAAUGCUGUCUGAGAAGN | 878 | NCUUCUCAGACAGCAUUGN | 1635-1653 | 1633 |
| 405 | AUCCAAUGCUGUCUGAGAA | 879 | UUCUCAGACAGCAUUGGAU | 1637-1655 | 1635 |
| 406 | UUCCAAUGCUGUCUGAGAA | 880 | UUCUCAGACAGCAUUGGAA | 1637-1655 | 1635 |
| 407 | NUCCAAUGCUGUCUGAGAA | 881 | UUCUCAGACAGCAUUGGAN | 1637-1655 | 1635 |
| 408 | NUCCAAUGCUGUCUGAGAN | 882 | NUCUCAGACAGCAUUGGAN | 1637-1655 | 1635 |
| 409 | UUAGGAAAUCCAAUGCUGU | 883 | ACAGCAUUGGAUUUCCUAA | 1644-1662 | 1642 |
| 410 | AUAGGAAAUCCAAUGCUGU | 884 | ACAGCAUUGGAUUUCCUAU | 1644-1662 | 1642 |
| 411 | NUAGGAAAUCCAAUGCUGU | 885 | ACAGCAUUGGAUUUCCUAN | 1644-1662 | 1642 |
| 412 | NUAGGAAAUCCAAUGCUGN | 886 | NCAGCAUUGGAUUUCCUAN | 1644-1662 | 1642 |
| 413 | ACCUUUAGGAAAUCCAAUG | 887 | CAUUGGAUUUCCUAAAGGU | 1648-1666 | 1646 |
| 414 | UCCUUUAGGAAAUCCAAUG | 888 | CAUUGGAUUUCCUAAAGGA | 1648-1666 | 1646 |
| 415 | NCCUUUAGGAAAUCCAAUG | 889 | CAUUGGAUUUCCUAAAGGN | 1648-1666 | 1646 |
| 416 | NCCUUUAGGAAAUCCAAUN | 890 | NAUUGGAUUUCCUAAAGGN | 1648-1666 | 1646 |
| 417 | GCACCUUUAGGAAAUCCAA | 891 | UUGGAUUUCCUAAAGGUGC | 1650-1668 | 1648 |
| 418 | UCACCUUUAGGAAAUCCAA | 892 | UUGGAUUUCCUAAAGGUGA | 1650-1668 | 1648 |
| 419 | ACACCUUUAGGAAAUCCAA | 893 | UUGGAUUUCCUAAAGGUGU | 1650-1668 | 1648 |
| 420 | NCACCUUUAGGAAAUCCAA | 894 | UUGGAUUUCCUAAAGGUGN | 1650-1668 | 1648 |
| 421 | NCACCUUUAGGAAAUCCAN | 895 | NUGGAUUUCCUAAAGGUGN | 1650-1668 | 1648 |
| 422 | CCCUUUAAAGGUUUUCAGU | 896 | ACUGAAAACCUUUAAAGGG | 1819-1837 | 1817 |
| 423 | UCCUUUAAAGGUUUUCAGU | 897 | ACUGAAAACCUUUAAAGGA | 1819-1837 | 1817 |
| 424 | ACCUUUAAAGGUUUUCAGU | 898 | ACUGAAAACCUUUAAAGGU | 1819-1837 | 1817 |
| 425 | NCCUUUAAAGGUUUUCAGU | 899 | ACUGAAAACCUUUAAAGGN | 1819-1837 | 1817 |
| 426 | NCCUUUAAAGGUUUUCAGN | 900 | NCUGAAAACCUUUAAAGGN | 1819-1837 | 1817 |
| 427 | CAACUGACAUAUGCUUUCC | 901 | GGAAAGCAUAUGUCAGUUG | 1844-1862 | 1842 |
| 428 | UAACUGACAUAUGCUUUCC | 902 | GGAAAGCAUAUGUCAGUUA | 1844-1862 | 1842 |
| 429 | AAACUGACAUAUGCUUUCC | 903 | GGAAAGCAUAUGUCAGUUU | 1844-1862 | 1842 |
| 430 | NAACUGACAUAUGCUUUCC | 904 | GGAAAGCAUAUGUCAGUUN | 1844-1862 | 1842 |
| 431 | NAACUGACAUAUGCUUUCN | 905 | NGAAAGCAUAUGUCAGUUN | 1844-1862 | 1842 |
| 432 | GGGUUUUAAACAACUGACA | 906 | UGUCAGUUGUUUAAAACCC | 1854-1872 | 1852 |
| 433 | UGGUUUUAAACAACUGACA | 907 | UGUCAGUUGUUUAAAACCA | 1854-1872 | 1852 |
| 434 | AGGUUUUAAACAACUGACA | 908 | UGUCAGUUGUUUAAAACCU | 1854-1872 | 1852 |
| 435 | NGGUUUUAAACAACUGACA | 909 | UGUCAGUUGUUUAAAACCN | 1854-1872 | 1852 |
| 436 | NGGUUUUAAACAACUGACN | 910 | NGUCAGUUGUUUAAAACCN | 1854-1872 | 1852 |
| 437 | UUCAUCAGAUCUUAGAGUU | 911 | AACUCUAAGAUCUGAUGAA | 1899-1917 | 1897 |
| 438 | AUCAUCAGAUCUUAGAGUU | 912 | AACUCUAAGAUCUGAUGAU | 1899-1917 | 1897 |
| 439 | NUCAUCAGAUCUUAGAGUU | 913 | AACUCUAAGAUCUGAUGAN | 1899-1917 | 1897 |
| 440 | NUCAUCAGAUCUUAGAGUN | 914 | NACUCUAAGAUCUGAUGAN | 1899-1917 | 1897 |
| 441 | CUUCAUCAGAUCUUAGAGU | 915 | ACUCUAAGAUCUGAUGAAG | 1900-1918 | 1898 |
| 442 | UUUCAUCAGAUCUUAGAGU | 916 | ACUCUAAGAUCUGAUGAAA | 1900-1918 | 1898 |
| 443 | AUUCAUCAGAUCUUAGAGU | 917 | ACUCUAAGAUCUGAUGAAU | 1900-1918 | 1898 |
| 444 | NUUCAUCAGAUCUUAGAGU | 918 | ACUCUAAGAUCUGAUGAAN | 1900-1918 | 1898 |
| 445 | NUUCAUCAGAUCUUAGAGN | 919 | NCUCUAAGAUCUGAUGAAN | 1900-1918 | 1898 |
| 446 | UACUUCAUCAGAUCUUAGA | 920 | UCUAAGAUCUGAUGAAGUA | 1902-1920 | 1900 |
| 447 | AACUUCAUCAGAUCUUAGA | 921 | UCUAAGAUCUGAUGAAGUU | 1902-1920 | 1900 |
| 448 | NACUUCAUCAGAUCUUAGA | 922 | UCUAAGAUCUGAUGAAGUN | 1902-1920 | 1900 |
| 449 | NACUUCAUCAGAUCUUAGN | 923 | NCUAAGAUCUGAUGAAGUN | 1902-1920 | 1900 |
| 450 | CAAAGGACAAAAUGGCAAU | 924 | AUUGCCAUUUUGUCCUUUG | 1929-1947 | 1927 |
| 451 | UAAAGGACAAAAUGGCAAU | 925 | AUUGCCAUUUUGUCCUUUA | 1929-1947 | 1927 |
| 452 | AAAAGGACAAAAUGGCAAU | 926 | AUUGCCAUUUUGUCCUUUU | 1929-1947 | 1927 |
| 453 | NAAAGGACAAAAUGGCAAU | 927 | AUUGCCAUUUUGUCCUUUN | 1929-1947 | 1927 |
| 454 | NAAAGGACAAAAUGGCAAN | 928 | NUUGCCAUUUUGUCCUUUN | 1929-1947 | 1927 |
| 455 | UAAUCAAAGGACAAAAUGG | 929 | CCAUUUUGUCCUUUGAUUA | 1933-1951 | 1931 |
| 456 | AAAUCAAAGGACAAAAUGG | 930 | CCAUUUUGUCCUUUGAUUU | 1933-1951 | 1931 |
| 457 | NAAUCAAAGGACAAAAUGG | 931 | CCAUUUUGUCCUUUGAUUN | 1933-1951 | 1931 |
| 458 | NAAUCAAAGGACAAAAUGN | 932 | NCAUUUUGUCCUUUGAUUN | 1933-1951 | 1931 |
| 459 | CAAGUUUAGUCAACUUCCC | 933 | GGGAAGUUGACUAAACUUG | 1956-1974 | 1954 |
| 460 | UAAGUUUAGUCAACUUCCC | 934 | GGGAAGUUGACUAAACUUA | 1956-1974 | 1954 |
| 461 | AAAGUUUAGUCAACUUCCC | 935 | GGGAAGUUGACUAAACUUU | 1956-1974 | 1954 |
| 462 | NAAGUUUAGUCAACUUCCC | 936 | GGGAAGUUGACUAAACUUN | 1956-1974 | 1954 |
| 463 | NAAGUUUAGUCAACUUCCN | 937 | NGGAAGUUGACUAAACUUN | 1956-1974 | 1954 |
| 464 | UCAAGUUUAGUCAACUUCC | 938 | GGAAGUUGACUAAACUUGA | 1957-1975 | 1955 |
| 465 | ACAAGUUUAGUCAACUUCC | 939 | GGAAGUUGACUAAACUUGU | 1957-1975 | 1955 |
| 466 | NCAAGUUUAGUCAACUUCC | 940 | GGAAGUUGACUAAACUUGN | 1957-1975 | 1955 |
| 467 | NCAAGUUUAGUCAACUUCN | 941 | NGAAGUUGACUAAACUUGN | 1957-1975 | 1955 |
| 468 | UAGCUUCCAUUUAUUCACA | 942 | UGUGAAUAAAUGGAAGCUA | 1992-2010 | 1990 |
| 469 | AAGCUUCCAUUUAUUCACA | 943 | UGUGAAUAAAUGGAAGCUU | 1992-2010 | 1990 |
| 470 | NAGCUUCCAUUUAUUCACA | 944 | UGUGAAUAAAUGGAAGCUN | 1992-2010 | 1990 |
| 471 | NAGCUUCCAUUUAUUCACN | 945 | NGUGAAUAAAUGGAAGCUN | 1992-2010 | 1990 |
| 472 | AGUAAGAUCUGAAACUAGU | 946 | ACUAGUUUCAGAUCUUACU | 2016-2034 | 2014 |
| 473 | UGUAAGAUCUGAAACUAGU | 947 | ACUAGUUUCAGAUCUUACA | 2016-2034 | 2014 |
| 474 | NGUAAGAUCUGAAACUAGU | 948 | ACUAGUUUCAGAUCUUACN | 2016-2034 | 2014 |
| 475 | NGUAAGAUCUGAAACUAGN | 949 | NCUAGUUUCAGAUCUUACN | 2016-2034 | 2014 |
| 476 | AGUUAGUAAGAUCUGAAAC | 950 | GUUUCAGAUCUUACUAACU | 2020-2038 | 2018 |
| 477 | UGUUAGUAAGAUCUGAAAC | 951 | GUUUCAGAUCUUACUAACA | 2020-2038 | 2018 |
| 478 | NGUUAGUAAGAUCUGAAAC | 952 | GUUUCAGAUCUUACUAACN | 2020-2038 | 2018 |
| 479 | NGUUAGUAAGAUCUGAAAN | 953 | NUUUCAGAUCUUACUAACN | 2020-2038 | 2018 |
| 480 | GAAGUUAGUAAGAUCUGAA | 954 | UUCAGAUCUUACUAACUUC | 2022-2040 | 2020 |
| 481 | UAAGUUAGUAAGAUCUGAA | 955 | UUCAGAUCUUACUAACUUA | 2022-2040 | 2020 |
| 482 | AAAGUUAGUAAGAUCUGAA | 956 | UUCAGAUCUUACUAACUUU | 2022-2040 | 2020 |
| 483 | NAAGUUAGUAAGAUCUGAA | 957 | UUCAGAUCUUACUAACUUN | 2022-2040 | 2020 |
| 484 | NAAGUUAGUAAGAUCUGAN | 958 | NUCAGAUCUUACUAACUUN | 2022-2040 | 2020 |
| 485 | CCAUAAAACAAGCACAUGC | 959 | GCAUGUGCUUGUUUUAUGG | 2632-2650 | 2630 |
| 486 | UCAUAAAACAAGCACAUGC | 960 | GCAUGUGCUUGUUUUAUGA | 2632-2650 | 2630 |
| 487 | ACAUAAAACAAGCACAUGC | 961 | GCAUGUGCUUGUUUUAUGU | 2632-2650 | 2630 |
| 488 | NCAUAAAACAAGCACAUGC | 962 | GCAUGUGCUUGUUUUAUGN | 2632-2650 | 2630 |
| 489 | NCAUAAAACAAGCACAUGN | 963 | NCAUGUGCUUGUUUUAUGN | 2632-2650 | 2630 |
| 490 | CUGAACACUUCGCUUUGUC | 964 | GACAAAGCGAAGUGUUCAG | 2781-2799 | 2779 |
| 491 | UUGAACACUUCGCUUUGUC | 965 | GACAAAGCGAAGUGUUCAA | 2781-2799 | 2779 |
| 492 | AUGAACACUUCGCUUUGUC | 966 | GACAAAGCGAAGUGUUCAU | 2781-2799 | 2779 |
| 493 | NUGAACACUUCGCUUUGUC | 967 | GACAAAGCGAAGUGUUCAN | 2781-2799 | 2779 |
| 494 | NUGAACACUUCGCUUUGUN | 968 | NACAAAGCGAAGUGUUCAN | 2781-2799 | 2779 |
| 495 | AGAUUCUAGAGGUCACUGG | 969 | CCAGUGACCUCUAGAAUCU | 3192-3210 | 3190 |
| 496 | UGAUUCUAGAGGUCACUGG | 970 | CCAGUGACCUCUAGAAUCA | 3192-3210 | 3190 |
| 497 | NGAUUCUAGAGGUCACUGG | 971 | CCAGUGACCUCUAGAAUCN | 3192-3210 | 3190 |
| 498 | NGAUUCUAGAGGUCACUGN | 972 | NCAGUGACCUCUAGAAUCN | 3192-3210 | 3190 |
| 499 | UGGAAUAGUGUGCAAAUGC | 973 | GCAUUUGCACACUAUUCCA | 3334-3352 | 3332 |
| 500 | AGGAAUAGUGUGCAAAUGC | 974 | GCAUUUGCACACUAUUCCU | 3334-3352 | 3332 |
| 501 | NGGAAUAGUGUGCAAAUGC | 975 | GCAUUUGCACACUAUUCCN | 3334-3352 | 3332 |
| 502 | NGGAAUAGUGUGCAAAUGN | 976 | NCAUUUGCACACUAUUCCN | 3334-3352 | 3332 |
| 503 | CUGAUCUCAAACAUCUGUC | 977 | GACAGAUGUUUGAGAUCAG | 3414-3432 | 3412 |
| 504 | UUGAUCUCAAACAUCUGUC | 978 | GACAGAUGUUUGAGAUCAA | 3414-3432 | 3412 |
| 505 | AUGAUCUCAAACAUCUGUC | 979 | GACAGAUGUUUGAGAUCAU | 3414-3432 | 3412 |
| 506 | NUGAUCUCAAACAUCUGUC | 980 | GACAGAUGUUUGAGAUCAN | 3414-3432 | 3412 |
| 507 | NUGAUCUCAAACAUCUGUN | 981 | NACAGAUGUUUGAGAUCAN | 3414-3432 | 3412 |
| 508 | CAGCAUAAGUUGCCACACA | 982 | UGUGUGGCAACUUAUGCUG | 3466-3484 | 3464 |
| 509 | UAGCAUAAGUUGCCACACA | 983 | UGUGUGGCAACUUAUGCUA | 3466-3484 | 3464 |
| 510 | AAGCAUAAGUUGCCACACA | 984 | UGUGUGGCAACUUAUGCUU | 3466-3484 | 3464 |
| 511 | NAGCAUAAGUUGCCACACA | 985 | UGUGUGGCAACUUAUGCUN | 3466-3484 | 3464 |
| 512 | NAGCAUAAGUUGCCACACN | 986 | NGUGUGGCAACUUAUGCUN | 3466-3484 | 3464 |
| 513 | CCACAAUCAAGGUCUGGUC | 987 | GACCAGACCUUGAUUGUGG | 3993-4011 | 3991 |
| 514 | UCACAAUCAAGGUCUGGUC | 988 | GACCAGACCUUGAUUGUGA | 3993-4011 | 3991 |
| 515 | ACACAAUCAAGGUCUGGUC | 989 | GACCAGACCUUGAUUGUGU | 3993-4011 | 3991 |
| 516 | NCACAAUCAAGGUCUGGUC | 990 | GACCAGACCUUGAUUGUGN | 3993-4011 | 3991 |
| 517 | NCACAAUCAAGGUCUGGUN | 991 | NACCAGACCUUGAUUGUGN | 3993-4011 | 3991 |
| 518 | AGAAAGAGAGUGCUUCUCC | 992 | GGAGAAGCACUCUCUUUCU | 4502-4520 | 4500 |
| 519 | UGAAAGAGAGUGCUUCUCC | 993 | GGAGAAGCACUCUCUUUCA | 4502-4520 | 4500 |
| 520 | NGAAAGAGAGUGCUUCUCC | 994 | GGAGAAGCACUCUCUUUCN | 4502-4520 | 4500 |
| 521 | NGAAAGAGAGUGCUUCUCN | 995 | NGAGAAGCACUCUCUUUCN | 4502-4520 | 4500 |
| 522 | GGUUAGAGAGAGUUUGGUU | 996 | AACCAAACUCUCUCUAACC | 4584-4602 | 4582 |
| 523 | UGUUAGAGAGAGUUUGGUU | 997 | AACCAAACUCUCUCUAACA | 4584-4602 | 4582 |
| 524 | AGUUAGAGAGAGUUUGGUU | 998 | AACCAAACUCUCUCUAACU | 4584-4602 | 4582 |
| 525 | NGUUAGAGAGAGUUUGGUU | 999 | AACCAAACUCUCUCUAACN | 4584-4602 | 4582 |
| 526 | NGUUAGAGAGAGUUUGGUN | 1000 | NACCAAACUCUCUCUAACN | 4584-4602 | 4582 |
| 527 | CAAGGUUAGAGAGAGUUUG | 1001 | CAAACUCUCUCUAACCUUG | 4587-4605 | 4585 |
| 528 | UAAGGUUAGAGAGAGUUUG | 1002 | CAAACUCUCUCUAACCUUA | 4587-4605 | 4585 |
| 529 | AAAGGUUAGAGAGAGUUUG | 1003 | CAAACUCUCUCUAACCUUU | 4587-4605 | 4585 |
| 530 | NAAGGUUAGAGAGAGUUUG | 1004 | CAAACUCUCUCUAACCUUN | 4587-4605 | 4585 |
| 531 | NAAGGUUAGAGAGAGUUUN | 1005 | NAAACUCUCUCUAACCUUN | 4587-4605 | 4585 |
| 532 | UGGUUUUGUAACUUACAUC | 1006 | GAUGUAAGUUACAAAACCA | 4625-4643 | 4623 |
| 533 | AGGUUUUGUAACUUACAUC | 1007 | GAUGUAAGUUACAAAACCU | 4625-4643 | 4623 |
| 534 | NGGUUUUGUAACUUACAUC | 1008 | GAUGUAAGUUACAAAACCN | 4625-4643 | 4623 |
| 535 | NGGUUUUGUAACUUACAUN | 1009 | NAUGUAAGUUACAAAACCN | 4625-4643 | 4623 |
| 536 | GCACUUUCAUCACAGGUGG | 1010 | CCACCUGUGAUGAAAGUGC | 4641-4659 | 4639 |
| 537 | UCACUUUCAUCACAGGUGG | 1011 | CCACCUGUGAUGAAAGUGA | 4641-4659 | 4639 |
| 538 | ACACUUUCAUCACAGGUGG | 1012 | CCACCUGUGAUGAAAGUGU | 4641-4659 | 4639 |
| 539 | NCACUUUCAUCACAGGUGG | 1013 | CCACCUGUGAUGAAAGUGN | 4641-4659 | 4639 |
| 540 | NCACUUUCAUCACAGGUGN | 1014 | NCACCUGUGAUGAAAGUGN | 4641-4659 | 4639 |
| 541 | GGAUUAUAAAUGCACCAGU | 1015 | ACUGGUGCAUUUAUAAUCC | 5257-5275 | 5255 |
| 542 | UGAUUAUAAAUGCACCAGU | 1016 | ACUGGUGCAUUUAUAAUCA | 5257-5275 | 5255 |
| 543 | AGAUUAUAAAUGCACCAGU | 1017 | ACUGGUGCAUUUAUAAUCU | 5257-5275 | 5255 |
| 544 | NGAUUAUAAAUGCACCAGU | 1018 | ACUGGUGCAUUUAUAAUCN | 5257-5275 | 5255 |
| 545 | NGAUUAUAAAUGCACCAGN | 1019 | ACUGGUGCAUUUAUAAUCN | 5257-5275 | 5255 |
| 546 | CAGAGUUAUAGUCAGAGCU | 1020 | AGCUCUGACUAUAACUCUG | 5851-5869 | 5849 |
| 547 | UAGAGUUAUAGUCAGAGCU | 1021 | AGCUCUGACUAUAACUCUA | 5851-5869 | 5849 |
| 548 | AAGAGUUAUAGUCAGAGCU | 1022 | AGCUCUGACUAUAACUCUU | 5851-5869 | 5849 |
| 549 | NAGAGUUAUAGUCAGAGCU | 1023 | AGCUCUGACUAUAACUCUN | 5851-5869 | 5849 |
| 550 | NAGAGUUAUAGUCAGAGCN | 1024 | NGCUCUGACUAUAACUCUN | 5851-5869 | 5849 |
| 551 | CUAGGAUGCUCUGUAAAGG | 1025 | CCUUUACAGAGCAUCCUAG | 6145-6163 | 6143 |
| 552 | UUAGGAUGCUCUGUAAAGG | 1026 | CCUUUACAGAGCAUCCUAA | 6145-6163 | 6143 |
| 553 | AUAGGAUGCUCUGUAAAGG | 1027 | CCUUUACAGAGCAUCCUAU | 6145-6163 | 6143 |
| 554 | NUAGGAUGCUCUGUAAAGG | 1028 | CCUUUACAGAGCAUCCUAN | 6145-6163 | 6143 |
| 555 | NUAGGAUGCUCUGUAAAGN | 1029 | NCUUUACAGAGCAUCCUAN | 6145-6163 | 6143 |
| 556 | AGUUAGACUUAACUUAGUU | 1030 | AACUAAGUUAAGUCUAACU | 6296-6314 | 6294 |
| 557 | UGUUAGACUUAACUUAGUU | 1031 | AACUAAGUUAAGUCUAACA | 6296-6314 | 6294 |
| 558 | NGUUAGACUUAACUUAGUU | 1032 | AACUAAGUUAAGUCUAACN | 6296-6314 | 6294 |
| 559 | NGUUAGACUUAACUUAGUN | 1033 | NACUAAGUUAAGUCUAACN | 6296-6314 | 6294 |
| 560 | AGUAAAUUCAAUCUCUCUG | 1034 | CAGAGAGAUUGAAUUUACU | 6410-6428 | 6408 |
| 561 | UGUAAAUUCAAUCUCUCUG | 1035 | CAGAGAGAUUGAAUUUACA | 6410-6428 | 6408 |
| 562 | NGUAAAUUCAAUCUCUCUG | 1036 | CAGAGAGAUUGAAUUUACN | 6410-6428 | 6408 |
| 563 | NGUAAAUUCAAUCUCUCUN | 1037 | NAGAGAGAUUGAAUUUACN | 6410-6428 | 6408 |
| 564 | GGUUGAUGUUAACCAGAGC | 1038 | GCUCUGGUUAACAUCAACC | 6539-6557 | 6537 |
| 565 | UGUUGAUGUUAACCAGAGC | 1039 | GCUCUGGUUAACAUCAACA | 6539-6557 | 6537 |
| 566 | AGUUGAUGUUAACCAGAGC | 1040 | GCUCUGGUUAACAUCAACU | 6539-6557 | 6537 |
| 567 | NGUUGAUGUUAACCAGAGC | 1041 | GCUCUGGUUAACAUCAACN | 6539-6557 | 6537 |
| 568 | NGUUGAUGUUAACCAGAGN | 1042 | NCUCUGGUUAACAUCAACN | 6539-6557 | 6537 |
| 569 | AAACUAUGAUGUCAGGUCA | 1043 | UGACCUGACAUCAUAGUUU | 6835-6853 | 6833 |
| 570 | UAACUAUGAUGUCAGGUCA | 1044 | UGACCUGACAUCAUAGUUA | 6835-6853 | 6833 |
| 571 | NAACUAUGAUGUCAGGUCA | 1045 | UGACCUGACAUCAUAGUUN | 6835-6853 | 6833 |
| 572 | NAACUAUGAUGUCAGGUCN | 1046 | NGACCUGACAUCAUAGUUN | 6835-6853 | 6833 |
| 573 | ACAUUAACGAGAUCUGUUU | 1047 | AAACAGAUCUCGUUAAUGU | 6959-6977 | 6957 |
| 574 | UCAUUAACGAGAUCUGUUU | 1048 | AAACAGAUCUCGUUAAUGA | 6959-6977 | 6957 |
| 575 | NCAUUAACGAGAUCUGUUU | 1049 | AAACAGAUCUCGUUAAUGN | 6959-6977 | 6957 |
| 576 | NCAUUAACGAGAUCUGUUN | 1050 | NAACAGAUCUCGUUAAUGN | 6959-6977 | 6957 |
| 577 | GCAGAAUAUAGCUUUAAGA | 1051 | UCUUAAAGCUAUAUUCUGC | 7210-7228 | 7208 |
| 578 | UCAGAAUAUAGCUUUAAGA | 1052 | UCUUAAAGCUAUAUUCUGA | 7210-7228 | 7208 |
| 579 | ACAGAAUAUAGCUUUAAGA | 1053 | UCUUAAAGCUAUAUUCUGU | 7210-7228 | 7208 |
| 580 | NCAGAAUAUAGCUUUAAGA | 1054 | UCUUAAAGCUAUAUUCUGN | 7210-7228 | 7208 |
| 581 | NCAGAAUAUAGCUUUAAGN | 1055 | NCUUAAAGCUAUAUUCUGN | 7210-7228 | 7208 |

[0101] The MARC1 RNAi agent sense strands and antisense strands that comprise or consist of the sequences in Table 2 can be modified nucleotides or unmodified nucleotides. In some embodiments, the MARC1 RNAi agents having the sense and antisense strand sequences that comprise or consist of the sequences in Table 2 are all or substantially all modified nucleotides.

[0102] In some embodiments, the antisense strand of a MARC1 RNAi agent disclosed herein differs by 0. 1. 2, or 3 nucleotides from any of the antisense strand sequences in Table 2. In some embodiments, the sense strand of a MARC1 RNAi agent disclosed herein differs by 0, 1, 2, or 3 nucleotides from any of the sense strand sequences in Table 2.

[0103] As used herein, each N listed in a sequence disclosed in Table 2 may be independently selected from any and all nucleobases (including those found on both modified and unmodified nucleotides). In some embodiments, an N nucleotide listed in a sequence disclosed in Table 2 has a nucleobase that is complementary to the N nucleotide at the corresponding position on the other strand. In some embodiments, an N nucleotide listed in a sequence disclosed in Table 2 has a nucleobase that is not complementary to the N nucleotide at the corresponding position on the other strand. In some embodiments, an N nucleotide listed in a sequence disclosed in Table 2 has a nucleobase that is the same as the N nucleotide at the corresponding position on the other strand. In some embodiments. an N nucleotide listed in a sequence disclosed in Table 2 has a nucleobase that is different from the N nucleotide at the corresponding position on the other strand.

[0104] Certain modified MARC1 RNAi agent antisense strands, as well as their underlying unmodified nucleobase sequences, are provided in Table 3. Certain modified MARC1 RNAi agent sense strands, as well as their underlying unmodified nucleobase sequences, are provided in Table 4. In forming MARC1 RNAi agents, each of the nucleotides in each of the underlying base sequences listed in Tables 3 and 4. as well as in Table 2, above, can be a modified nucleotide.

[0105] The MARC1 RNAi agents described herein are formed by annealing an antisense strand with a sense strand. A sense strand containing a sequence listed in Table 2, Table 4, or Table 6D, can be hybridized to any antisense strand containing a sequence listed in Table 2 or Table 3 or Table 6D, provided the two sequences have a region of at least 85% complementarity over a contiguous 15, 16, 17, 18, 19, 20, or 21 nucleotide sequence.

[0106] In some embodiments, a MARC1 RNAi agent antisense strand comprises a nucleotide sequence of any of the sequences in Table 2 or Table 3 or Table 6D.

[0107] In some embodiments, a MARC1 RNAi agent comprises or consists of a duplex having the nucleobase sequences of the sense strand and the antisense strand of any of the sequences in Table 2, Table 3, Table 4, or Table 6D. In some embodiments, a MARC1 RNAi agent comprises or consists of a duplex sequence prepared or provided as a sodium salt, mixed salt, or a free-acid.

[0108] Examples of antisense strands containing modified nucleotides are provided in Table 3 and Table 6D. Examples of sense strands containing modified nucleotides are provided in Table 4, Table 5, and Table 6D.

[0109] As used in Tables 3, 4, and 5, the following notations are used to indicate modified nucleotides and linking groups:
[0110] A=adenosine-3′-phosphate:
[0111] C=cytidine-3′-phosphate:
[0112] G=guanosine-3′-phosphate:
[0113] U=uridine-3′-phosphate
[0114] I=inosine-3′-phosphate
[0115] a=2′-O-methyladenosine-3′-phosphate
[0116] as =2′-O-methyladenosine-3′-phosphorothioate
[0117] C=2′-O-methylcytidine-3′-phosphate
[0118] CS: 2′-O-methylcytidine-3′-phosphorothioate
[0119] g 2′-O-methylguanosine-3′-phosphate
[0120] gs: 2′-O-methylguanosine-3′-phosphorothioate
[0121] t=2′-O-methyl-5-methyluridine-3′-phosphate
[0122] ts=2′-O-methyl-5-methyluridine-3′-phosphorothioate
[0123] u=2′-O-methyluridine-3′-phosphate
[0124] us=2′-O-methyluridine-3′-phosphorothioate
[0125] i=2′-O-methylinosine-3′-phosphate
[0126] is =2′-O-methylinosine-3′-phosphorothioate
[0127] Af=2′-fluoroadenosine-3′-phosphate
[0128] Afs=2′-fluoroadenosine-3′-phosporothioate
[0129] Cf 2′-fluorocytidine-3′-phosphate
[0130] Cfs=2′-fluorocytidine-3′-phosphorothioate
[0131] Gf: 2′-fluoroguanosine-3′-phosphate
[0132] Gfs=2′-fluoroguanosine-3′-phosphorothioate
[0133] Tf=2′-fluoro-5′-methyluridine-3′-phosphate
[0134] Tfs=2′-fluoro-5′-methyluridine-3′-phosphorothioate
[0135] Uf=2′-fluorouridine-3′-phosphate
[0136] Ufs=2′-fluorouridine-3′-phosphorothioate
[0137] A_{UNA}=2′,3′-seco-adenosine-3′-phosphate, see Table 7
[0138] A_{UNAS}=2′,3′-seco-adenosine-3′-phosphorothioate, see Table 7
[0139] C_{UNA}=2′, 3′-seco-cytidine-3′-phosphate, see Table 7
[0140] C_{UNAS}=2′,3′-seco-cytidine-3′-phosphorothioate, see Table 7
[0141] G_{UNA} 2′,3′-seco-guanosine-3′-phosphate, see Table 7
[0142] G_{UNAS} 2′,3′-seco-guanosine-3′-phosphorothioate, see Table 7
[0143] U_{UNA} 2′,3′-seco-uridine-3′-phosphate, see Table 7
[0144] U_{UNAS} 2′,3′-seco-uridine-3′-phosphorothioate, see Table 7
[0145] a 2N=2′-O-methyl-2-aminoadenosine-3′-phosphate, see Table 7
[0146] a 2Ns=2′-O-methyl-2-aminoadenosine-3′-phosphorothioate, see Table 7
[0147] (invAb)=inverted abasic deoxyribonucleotide, see Table 7
[0148] (invAb)s=inverted abasic deoxyribonucleotide-5′-phosphorothioate, see Table 7
[0149] cPrpa=5′-cyclopropyl phosphonate-2′-O-methyladenosine-3′-phosphate (see Table 7)
[0150] cPrpas=5′-cyclopropyl phosphonate-2′-O-methyladenosine-3′-phosphorothioate (see Table 7)
[0151] cPrpu 5′-cyclopropyl phosphonate-2′-O-methyluridine-3′-phosphate (see Table 7)
[0152] cPrpus=5′-cyclopropyl phosphonate-2′-O-methyluridine-3′-phosphorothioate (see Table 7)

[0153] As the person of ordinary skill in the art would readily understand, unless otherwise indicated by the sequence (such as, for example. by a phosphorothioate linkage “s”). when present in an oligonucleotide, the nucleotide monomers are mutually linked by 5′-3′-phosphodiester bonds. As the person of ordinary skill in the art would clearly understand, the inclusion of a phosphorothioate linkage as shown in the modified nucleotide sequences disclosed herein replaces the phosphodiester linkage typically present in oligonucleotides. Further, the person of ordinary skill in the art would readily understand that the terminal nucleotide at the 3′ end of a given oligonucleotide sequence would typically have a hydroxyl (—OH) group at the respective 3′ position of the given monomer instead of a phosphate moiety ex vivo. Additionally, for the embodiments disclosed herein, when viewing the respective strand 5′→3′, the inverted abasic residues are inserted such that the 3′ position of the deoxyribose is linked at the 3′ end of the preceding monomer on the respective strand (see. e.g., Table 7). Moreover, as the person of ordinary skill would readily understand and appreciate, while the phosphorothioate chemical structures depicted herein typically show the anion on the sulfur atom, the inventions disclosed herein encompass all phosphorothioate tautomers and resonance structures (e.g., where the sulfur atom has a double-bond and the anion is on an oxygen atom). Unless expressly indicated otherwise herein, such understandings of the person of ordinary skill in the art are used when describing the MARC1 RNAi agents and compositions of MARC1 RNAi agents disclosed herein.

[0154] Certain examples of targeting ligands, targeting groups, and linking groups used with the MARC1 RNAi agents disclosed herein are provided below in Table 7. More specifically, targeting groups and linking groups (which together can form a targeting ligand) include (NAG37) and (NAG37) s, for which their chemical structures are provided below in Table 7. Each sense strand and/or antisense strand can have any targeting ligands, targeting groups, or linking groups listed herein, as well as other groups, conjugated to the 5′ and/or 3′ end of the sequence.

TABLE 3
MARC1 RNAi agent Antisense Strand Sequences

| | | | Underlying Base Sequence | |
|---|---|---|---|---|
| | | SEQ | (5′ → 3′) | SEQ |
| AS Strand | Modified Antisense | ID | (Shown as an Unmodified | ID |
| ID | Strand (5′ → 3′) | NO. | Nucleotide Sequence) | NO. |
| AM16712-AS | usAfsasCfcAfuguuuCfcCfuCfcUfggsu | 1056 | UAACCAUGUUUCCCUCCUGGU | 1542 |
| AM16714-AS | usAfscsUfuCfaggaaGfcUfgGfuUfausc | 1057 | UACUUCAGGAAGCUGGUUAUC | 1543 |
| AM16716-AS | usAfsasCfaAfgucugCfuAfuUfuGfausg | 1058 | UAACAAGUCUGCUAUUUGAUG | 1544 |
| AM16718-AS | usGfsgsAfaCfaagucUfgCfuAfuUfugsg | 1059 | UGGAACAAGUCUGCUAUUUGG | 1545 |
| AM16720-AS | usGfsasGfuAfagcaaUfcUfgGfuCfcusc | 1060 | UGAGUAAGCAAUCUGGUCCUC | 1546 |
| AM16722-AS | usGfsusCfuGfaguaaGfcAfaUfcUfggsu | 1061 | UGUCUGAGUAAGCAAUCUGGU | 1547 |
| AM16724-AS | usUfsgsGfuGfU_{UNA}cugaGfuAfaGfcAfausc | 1062 | UUGGUGUCUGAGUAAGCAAUC | 1548 |
| AM16726-AS | usUfsasAfcUfuucuuCfuCfuAfgCfcusg | 1063 | UUAACUUUCUUCUCUAGCCUG | 1549 |
| AM16728-AS | usGfsgsUfuAfaaaugCfaUfcUfgGfaasc | 1064 | UGGUUAAAAUGCAUCUGGAAC | 1550 |
| AM16730-AS | asAfscsUfuUfcguucUfgAfaGfgGfucsa | 1065 | AACUUUCGUUCUGAAGGGUCA | 1551 |
| AM16732-AS | usUfscsCfaUfauaacUfuUfcGfuUfcusg | 1066 | UUCCAUAUAACUUUCGUUCUG | 1552 |
| AM16734-AS | usGfsasUfuUfuccauAfuAfaCfuUfucsg | 1067 | UGAUUUUCCAUAUAACUUUCG | 1553 |
| AM16736-AS | asAfsasGfaGfuggugAfuUfuUfcCfausg | 1068 | AAAGAGUGGUGAUUUUCCAUG | 1554 |
| AM16738-AS | usCfsasUfcUfaauauUfcCfaGfgAfcasc | 1069 | UCAUCUAAUAUUCCAGGACAC | 1555 |
| AM16740-AS | asGfsusGfuUfgucauUfuUfuGfaGfaasc | 1070 | AGUGUUGUCAUUUUUGAGAAC | 1556 |
| AM16742-AS | usAfsusGfcUfucaagUfgUfuGfuCfausc | 1071 | UAUGCUUCAAGUGUUGUCAUC | 1557 |
| AM16744-AS | asCfsasCfcAfU_{UNA}gcuuCfaAfgUfgUfugsc | 1072 | ACACCAUGCUUCAAGUGUUGC | 1558 |
| AM16746-AS | asGfsusUfcUfgaaacAfcCfaUfgCfuusc | 1073 | AGUUCUGAAACACCAUGCUUC | 1559 |
| AM16748-AS | usAfsusUfgAfagcauUfgAfgAfcAfccsa | 1074 | UAUUGAAGCAUUGAGACACCA | 1560 |
| AM16750-AS | usGfsasCfaUfugaagCfaUfuGfaGfacsg | 1075 | UGACAUUGAAGCAUUGAGACG | 1561 |
| AM16752-AS | usGfsasGfuUfuucagAfaUfcCfuGfucsc | 1076 | UGAGUUUUCAGAAUCCUGUCC | 1562 |
| AM16754-AS | asAfsgsAfaCfuauucCfaUfaAfuCfagsc | 1077 | AAGAACUAUUCCAUAAUCAGC | 1563 |
| AM16756-AS | asGfsasAfaGfaacuaUfuCfcAfuAfausc | 1078 | AGAAAGAACUAUUCCAUAAUC | 1564 |
| AM16758-AS | asGfsasUfcCfagaucUfaUfgGfaAfaasc | 1079 | AGAUCCAGAUCUAUGGAAAAC | 1565 |
| AM16760-AS | asUfscsCfaAfugcugUfcUfgAfgAfagsc | 1080 | AUCCAAUGCUGUCUGAGAAGC | 1566 |
| AM16762-AS | asCfscsUfuUfaggaaAfuCfcAfaUfgcsc | 1081 | ACCUUUAGGAAAUCCAAUGCC | 1567 |
| AM16764-AS | usCfsasCfcUfuuaggAfaAfuCfcAfausg | 1082 | UCACCUUUAGGAAAUCCAAUG | 1568 |
| AM16766-AS | usGfsgsUfuUfuaaacAfaCfuGfaCfausg | 1083 | UGGUUUUAAACAACUGACAUG | 1569 |
| AM16768-AS | usUfscsAfuCfagaucUfuAfgAfgUfuasc | 1084 | UUCAUCAGAUCUUAGAGUUAC | 1570 |
| AM16770-AS | usUfsusCfaUfcagauCfuUfaGfaGfuusg | 1085 | UUUCAUCAGAUCUUAGAGUUG | 1571 |
| AM16772-AS | usCfsasAfgUfuuaguCfaAfcUfuCfccsa | 1086 | UCAAGUUUAGUCAACUUCCCA | 1572 |
| AM16774-AS | usAfsgsCfuUfccauuUfaUfuCfaCfagsc | 1087 | UAGCUUCCAUUUAUUCACAGC | 1573 |
| AM17404-AS | asGfsusguugucauUfuUfuGfagaasc | 1088 | AGUGUUGUCAUUUUUGAGAAC | 1556 |
| AM17405-AS | cPrpasGfsusguugucauUfuUfuGfagaasc | 1089 | AGUGUUGUCAUUUUUGAGAAC | 1556 |
| AM17406-AS | usAfsusugaagcauUfgAfgAfcaccsa | 1090 | UAUUGAAGCAUUGAGACACCA | 1560 |
| AM17407-AS | cPrpusAfsusugaagcauUfgAfgAfcaccsa | 1091 | UAUUGAAGCAUUGAGACACCA | 1560 |
| AM17408-AS | asAfsgsaacuauucCfaUfaAfucagsc | 1092 | AAGAACUAUUCCAUAAUCAGC | 1563 |
| AM17409-AS | cPrpasAfsgsaacuauucCfaUfaAfucagsc | 1093 | AAGAACUAUUCCAUAAUCAGC | 1563 |
| AM17410-AS | asGfsasaagaacuaUfuCfcAfuaausc | 1094 | AGAAAGAACUAUUCCAUAAUC | 1564 |
| AM17411-AS | cPrpasGfsasaagaacuaUfuCfcAfuaausc | 1095 | AGAAAGAACUAUUCCAUAAUC | 1564 |
| AM17488-AS | usUfsgsAfuCfacaagCfcAfaAfaCfcusg | 1096 | UUGAUCACAAGCCAAAACCUG | 1574 |
| AM17490-AS | usCfsasUfaGfacaucGfcAfuCfcUfgasa | 1097 | UCAUAGACAUCGCAUCCUGAA | 1575 |
| AM17492-AS | usCfsasAfaGfaguggUfgAfuUfuUfccsa | 1098 | UCAAAGAGUGGUGAUUUUCCA | 1576 |
| AM17494-AS | usUfscsUfgAfaacacCfaUfgCfuUfcasa | 1099 | UUCUGAAACACCAUGCUUCAA | 1577 |
| AM17496-AS | usCfsasGfaAfuccugUfcUfuGfuCfausu | 1100 | UCAGAAUCCUGUCUUGUCAUU | 1578 |
| AM17498-AS | usCfsasAfuGfcugucUfgAfgAfaGfcasg | 1101 | UCAAUGCUGUCUGAGAAGCAG | 1579 |
| AM17500-AS | usCfscsUfuUfaaaggUfuUfuCfaGfuasg | 1102 | UCCUUUAAAGGUUUUCAGUAG | 1580 |
| AM17502-AS | usAfscsUfuCfaucagAfuCfuUfaGfagsu | 1103 | UACUUCAUCAGAUCUUAGAGU | 1581 |
| AM17504-AS | usAfsasGfuUfuagucAfaCfuUfcCfcasa | 1104 | UAAGUUUAGUCAACUUCCCAA | 1582 |
| AM17808-AS | usGfsusGfuAfggcugCfaCfuGfaGfagsu | 1105 | UGUGUAGGCUGCACUGAGAGU | 1583 |
| AM17810-AS | usUfsgsUfgUfaggcuGfcAfcUfgAfgasg | 1106 | UUGUGUAGGCUGCACUGAGAG | 1584 |
| AM17812-AS | usCfsusUfuGfuguagGfcUfgCfaCfugsa | 1107 | UCUUUGUGUAGGCUGCACUGA | 1585 |
| AM17814-AS | usUfscsCfuUfuguguAfgGfcUfgCfacsu | 1108 | UUCCUUUGUGUAGGCUGCACU | 1586 |
| AM17816-AS | usUfscsGfaAfgugcaCfcAfgGfcGfgusa | 1109 | UUCGAAGUGCACCAGGCGGUA | 1587 |
| AM17818-AS | usCfsusCfgAfagugcAfcCfaGfgCfggsu | 1110 | UCUCGAAGUGCACCAGGCGGU | 1588 |
| AM17820-AS | usGfscsUfcGfaagugCfaCfcAfgGfcgsg | 1111 | UGCUCGAAGUGCACCAGGCGG | 1589 |
| AM17822-AS | asGfsgsCfuCfgaaguGfcAfcCfaGfgcsg | 1112 | AGGCUCGAAGUGCACCAGGCG | 1590 |
| AM17824-AS | asAfscsUfcUfucaguGfuUfuCfcAfgcsg | 1113 | AACUCUUCAGUGUUUCCAGCG | 1591 |
| AM17826-AS | usAfscsAfgGfgucucCfcAfcUfuUfgasu | 1114 | UACAGGGUCUCCCACUUUGAU | 1592 |
| AM17828-AS | asCfsasCfaGfggucuCfcCfaCfuUfugsa | 1115 | ACACAGGGUCUCCCACUUUGA | 1593 |
| AM17830-AS | usGfsusAfcAfcagggUfcUfcCfcAfcusu | 1116 | UGUACACAGGGUCUCCCACUU | 1594 |
| AM17832-AS | asGfsgsUfaCfacaggGfuCfuCfcCfacsu | 1117 | AGGUACACAGGGUCUCCCACU | 1595 |
| AM17834-AS | usAfsgsGfuAfcacagGfgUfcUfcCfcasc | 1118 | UAGGUACACAGGGUCUCCCAC | 1596 |
| AM17864-AS | usGfsasAfcAfagucuGfcUfaUfuUfgasu | 1119 | UGAACAAGUCUGCUAUUUGAU | 1597 |
| AM17866-AS | usGfscsUfuUfaacuuUfcUfuCfuCfuasg | 1120 | UGCUUUAACUUUCUUCUCUAG | 1598 |
| AM17868-AS | usUfsusGfcUfuuaacUfuUfcUfuCfucsu | 1121 | UUUGCUUUAACUUUCUUCUCU | 1599 |
| AM17870-AS | usGfsasAfaUfuacaaUfaUfuGfgGfccsu | 1122 | UGAAAUUACAAUAUUGGGCCU | 1600 |
| AM17872-AS | usAfsasCfuUfucguuCfuGfaAfgGfgusc | 1123 | UAACUUUCGUUCUGAAGGGUC | 1601 |
| AM17874-AS | usCfsasUfaUfaacuuUfcGfuUfcUfgasa | 1124 | UCAUAUAACUUUCGUUCUGAA | 1602 |
| AM17876-AS | usUfscsCfaUfaaucaGfuUfaAfaCfggsg | 1125 | UUCCAUAAUCAGUUAAACGGG | 1603 |
| AM17878-AS | usUfsasGfgAfaauccAfaUfgCfuGfucsu | 1126 | UUAGGAAAUCCAAUGCUGUCU | 1604 |
| AM17880-AS | usAfsasAfgGfacaaaAfuGfgCfaAfuasa | 1127 | UAAAGGACAAAAUGGCAAUAA | 1605 |
| AM17882-AS | usAfsasUfcAfaaggaCfaAfaAfuGfgcsa | 1128 | UAAUCAAAGGACAAAAUGGCA | 1606 |
| AM18384-AS | usUfsgsauCfacaagCfcAfaAfaccusg | 1129 | UUGAUCACAAGCCAAAACCUG | 1574 |
| AM18385-AS | cPrpusUfsgsauCfacaagCfcAfaAfaccusg | 1130 | UUGAUCACAAGCCAAAACCUG | 1574 |
| AM18386-AS | usUfsgsaucacaagCfcAfaAfaccusg | 1131 | UUGAUCACAAGCCAAAACCUG | 1574 |
| AM18387-AS | cPrpusUfsgsaucacaagCfcAfaAfaccusg | 1132 | UUGAUCACAAGCCAAAACCUG | 1574 |
| AM18388-AS | usCfscsuuUfaaaggUfuUfuCfaguasg | 1133 | UCCUUUAAAGGUUUUCAGUAG | 1580 |
| AM18389-AS | cPrpusCfscsuuUfaaaggUfuUfuCfaguasg | 1134 | UCCUUUAAAGGUUUUCAGUAG | 1580 |
| AM18390-AS | usCfscsuuuaaaggUfuUfuCfaguasg | 1135 | UCCUUUAAAGGUUUUCAGUAG | 1580 |
| AM18391-AS | cPrpusCfscsuuuaaaggUfuUfuCfaguasg | 1136 | UCCUUUAAAGGUUUUCAGUAG | 1580 |
| AM18393-AS | usCfscsuuuaaaggUfuUfuCfagugsg | 1137 | UCCUUUAAAGGUUUUCAGUGG | 1607 |
| AM18394-AS | cPrpusCfscsuuuaaaggUfuUfuCfagugsg | 1138 | UCCUUUAAAGGUUUUCAGUGG | 1607 |
| AM18398-AS | asGfsasaaGfaacuaUfuCfcAfuaausc | 1139 | AGAAAGAACUAUUCCAUAAUC | 1564 |
| AM18399-AS | cPrpasGfsasaaGfaacuaUfuCfcAfuaausc | 1140 | AGAAAGAACUAUUCCAUAAUC | 1564 |
| AM18401-AS | usGfsasaaGfaacuaUfuCfcAfuaausc | 1141 | UGAAAGAACUAUUCCAUAAUC | 1608 |
| AM18402-AS | cPrpusGfsasaaGfaacuaUfuCfcAfuaausc | 1142 | UGAAAGAACUAUUCCAUAAUC | 1608 |
| AM18403-AS | cPrpusGfaaaGfaacuaUfuCfcAfuaausc | 1143 | UGAAAGAACUAUUCCAUAAUC | 1608 |
| AM18404-AS | asGfsusguUfgucauUfuUfuGfagaasc | 1144 | AGUGUUGUCAUUUUUGAGAAC | 1556 |
| AM18405-AS | cPrpasGfsusguUfgucauUfuUfuGfagaasc | 1145 | AGUGUUGUCAUUUUUGAGAAC | 1556 |
| AM18407-AS | usGfsusguUfgucauUfuUfuGfagaasc | 1146 | UGUGUUGUCAUUUUUGAGAAC | 1609 |
| AM18408-AS | cPrpusGfsusguUfgucauUfuUfuGfagaasc | 1147 | UGUGUUGUCAUUUUUGAGAAC | 1609 |
| AM18409-AS | cPrpusGfsusguU_{UNA}gucauUfuUfuGfagaasc | 1148 | UGUGUUGUCAUUUUUGAGAAC | 1609 |
| AM18410-AS | cPrpusGfuguUfgucauUfuUfuGfagaasc | 1149 | UGUGUUGUCAUUUUUGAGAAC | 1609 |
| AM18411-AS | usGfsusguugucauUfuUfuGfagaasc | 1150 | UGUGUUGUCAUUUUUGAGAAC | 1609 |
| AM18412-AS | cPrpusGfsusguugucauUfuUfuGfagaasc | 1151 | UGUGUUGUCAUUUUUGAGAAC | 1609 |
| AM18413-AS | cPrpusGfuguugucauUfuUfuGfagaasc | 1152 | UGUGUUGUCAUUUUUGAGAAC | 1609 |
| AM18606-AS | usCfsasgaAfuccugUfcUfuGfucausu | 1153 | UCAGAAUCCUGUCUUGUCAUU | 1578 |
| AM18607-AS | cPrpusCfsasgaAfuccugUfcUfuGfucausu | 1154 | UCAGAAUCCUGUCUUGUCAUU | 1578 |
| AM18608-AS | usCfsasgaauccugUfcUfuGfucausu | 1155 | UCAGAAUCCUGUCUUGUCAUU | 1578 |
| AM18609-AS | cPrpusCfsasgaauccugUfcUfuGfucausu | 1156 | UCAGAAUCCUGUCUUGUCAUU | 1578 |
| AM18610-AS | cPrpusCfagaauccugUfcUfuGfucausu | 1157 | UCAGAAUCCUGUCUUGUCAUU | 1578 |
| AM18611-AS | usAfsasguuuagucAfaCfuUfcccasa | 1158 | UAAGUUUAGUCAACUUCCCAA | 1582 |
| AM18612-AS | cPrpusAfsasguuuagucAfaCfuUfcccasa | 1159 | UAAGUUUAGUCAACUUCCCAA | 1582 |
| AM18614-AS | usUfsusGfaUfcacaaGfcCfaAfaAfccsu | 1160 | UUUGAUCACAAGCCAAAACCU | 1610 |
| AM18616-AS | usGfsusUfgAfucacaAfgCfcAfaAfacsc | 1161 | UGUUGAUCACAAGCCAAAACC | 1611 |
| AM18629-AS | asGfsasaAfgaacuaUfuCfcAfuaausc | 1162 | AGAAAGAACUAUUCCAUAAUC | 1564 |
| AM18632-AS | asGfsasaagAfacuaUfuCfcAfuaausc | 1163 | AGAAAGAACUAUUCCAUAAUC | 1564 |
| AM18634-AS | usAfsgsaaAfgaacuAfuUfcCfauaasu | 1164 | UAGAAAGAACUAUUCCAUAAU | 1612 |
| AM18636-AS | usAfsgsaaAfgaacuAfuUfcCfauagsu | 1165 | UAGAAAGAACUAUUCCAUAGU | 1613 |
| AM18638-AS | usAfsgsaaAfgaacuAfuUfcCfauagsc | 1166 | UAGAAAGAACUAUUCCAUAGC | 1614 |
| AM18878-AS | asGfsusAfaGfaucugAfaAfcUfaGfucsa | 1167 | AGUAAGAUCUGAAACUAGUCA | 1615 |
| AM18880-AS | asGfsusUfaGfuaagaUfcUfgAfaAfcusa | 1168 | AGUUAGUAAGAUCUGAAACUA | 1616 |
| AM18882-AS | usAfsasGfuUfaguaaGfaUfcUfgAfaasc | 1169 | UAAGUUAGUAAGAUCUGAAAC | 1617 |
| AM18884-AS | usCfsasUfaAfaacaaGfcAfcAfuGfcasc | 1170 | UCAUAAAACAAGCACAUGCAC | 1618 |
| AM18886-AS | usUfsgsAfaCfacuucGfcUfuUfgUfcusc | 1171 | UUGAACACUUCGCUUUGUCUC | 1619 |
| AM18888-AS | asGfsasUfuCfuagagGfuCfaCfuGfgasa | 1172 | AGAUUCUAGAGGUCACUGGAA | 1620 |
| AM18890-AS | usGfsgsAfaUfaguguGfcAfaAfuGfcusc | 1173 | UGGAAUAGUGUGCAAAUGCUC | 1621 |
| AM18892-AS | usUfsgsAfuCfucaaaCfaUfcUfgUfcasu | 1174 | UUGAUCUCAAACAUCUGUCAU | 1622 |
| AM18894-AS | usAfsgsCfaUfaaguuGfcCfaCfaCfagsa | 1175 | UAGCAUAAGUUGCCACACAGA | 1623 |
| AM18896-AS | usCfsasCfaAfucaagGfuCfuGfgUfcusg | 1176 | UCACAAUCAAGGUCUGGUCUG | 1624 |
| AM18898-AS | asGfsasAfaGfagaguGfcUfuCfuCfccsu | 1177 | AGAAAGAGAGUGCUUCUCCCU | 1625 |
| AM18900-AS | usGfsusUfaGfagagaGfuUfuGfgUfuusc | 1178 | UGUUAGAGAGAGUUUGGUUUC | 1626 |
| AM18902-AS | usAfsasGfgUfuagagAfgAfgUfuUfggsu | 1179 | UAAGGUUAGAGAGAGUUUGGU | 1627 |
| AM18904-AS | usGfsgsUfuUfuguaaCfuUfaCfaUfcasc | 1180 | UGGUUUUGUAACUUACAUCAC | 1628 |
| AM18906-AS | usCfsasCfuUfucaucAfcAfgGfuGfgusu | 1181 | UCACUUUCAUCACAGGUGGUU | 1629 |
| AM18908-AS | usGfsasUfuAfuaaauGfcAfcCfaGfucsa | 1182 | UGAUUAUAAAUGCACCAGUCA | 1630 |
| AM18910-AS | usAfsgsAfgUfuauagUfcAfgAfgCfugsu | 1183 | UAGAGUUAUAGUCAGAGCUGU | 1631 |
| AM18912-AS | usUfsasGfgAfugcucUfgUfaAfaGfgusa | 1184 | UUAGGAUGCUCUGUAAAGGUA | 1632 |
| AM18914-AS | asGfsusUfaGfacuuaAfcUfuAfgUfucsc | 1185 | AGUUAGACUUAACUUAGUUCC | 1633 |
| AM18916-AS | asGfsusAfaAfuucaaUfcUfcUfcUfgasg | 1186 | AGUAAAUUCAAUCUCUCUGAG | 1634 |
| AM18918-AS | usGfsusUfgAfuguuaAfcCfaGfaGfcusg | 1187 | UGUUGAUGUUAACCAGAGCUG | 1635 |
| AM18920-AS | asAfsasCfuAfugaugUfcAfgGfuCfaasc | 1188 | AAACUAUGAUGUCAGGUCAAC | 1636 |
| AM18922-AS | asCfsasUfuAfacgagAfuCfuGfuUfugsa | 1189 | ACAUUAACGAGAUCUGUUUGA | 1637 |
| AM18924-AS | usCfsasGfaAfuauagCfuUfuAfaGfaasc | 1190 | UCAGAAUAUAGCUUUAAGAAC | 1638 |
| AM18944-AS | asGfsusAfgUfaggucCfuUfuGfuGfuasg | 1191 | AGUAGUAGGUCCUUUGUGUAG | 1639 |
| AM18946-AS | usUfsgsCfuAfuuugaUfgAfgGfaCfgusc | 1192 | UUGCUAUUUGAUGAGGACGUC | 1640 |
| AM18948-AS | asUfsgsUfaGfaggucUfcAfgUfuCfugsa | 1193 | AUGUAGAGGUCUCAGUUCUGA | 1641 |
| AM18950-AS | asAfsasGfaAfaauguAfgAfgGfuCfucsa | 1194 | AAAGAAAAUGUAGAGGUCUCA | 1642 |
| AM18952-AS | asCfsgsAfaAfaauguGfaAfaAfuCfacsa | 1195 | ACGAAAAAUGUGAAAAUCACA | 1643 |
| AM18954-AS | usUfsasCfuGfaagucCfuAfcUfaAfgusu | 1196 | UUACUGAAGUCCUACUAAGUU | 1644 |
| AM18956-AS | asGfsasUfaAfacggaGfaAfgCfaGfgasg | 1197 | AGAUAAACGGAGAAGCAGGAG | 1645 |
| AM18958-AS | asCfsasUfuCfuaggaUfaUfuCfuUfccsa | 1198 | ACAUUCUAGGAUAUUCUUCCA | 1646 |
| AM18960-AS | usAfsasCfuGfacauaUfgCfuUfuCfcusu | 1199 | UAACUGACAUAUGCUUUCCUU | 1647 |
| AM19120-AS | cPrpusCfscsUfuUfaaaggUfuUfuCfaGfuasg | 1200 | UCCUUUAAAGGUUUUCAGUAG | 1580 |
| AM19121-AS | usCfscsUfuuaaaggUfuUfuCfaguasg | 1201 | UCCUUUAAAGGUUUUCAGUAG | 1580 |
| AM19122-AS | cPrpusCfscsUfuuaaaggUfuUfuCfaguasg | 1202 | UCCUUUAAAGGUUUUCAGUAG | 1580 |
| AM19123-AS | usCfscsuuuAfaaggUfuUfuCfaguasg | 1203 | UCCUUUAAAGGUUUUCAGUAG | 1580 |
| AM19125-AS | usAfsgsGfuacacagGfgUfcUfcccasc | 1204 | UAGGUACACAGGGUCUCCCAC | 1596 |
| AM19126-AS | usAfsgsguAfcacagGfgUfcUfcccasc | 1205 | UAGGUACACAGGGUCUCCCAC | 1596 |
| AM19127-AS | usAfsgsguaCfacagGfgUfcUfcccasc | 1206 | UAGGUACACAGGGUCUCCCAC | 1596 |
| AM19128-AS | cPrpusAfsgsguaCfacagGfgUfcUfcccasc | 1207 | UAGGUACACAGGGUCUCCCAC | 1596 |
| AM19131-AS | usAfsgsguaCfacagGfgUfcUfcccasu | 1208 | UAGGUACACAGGGUCUCCCAU | 1648 |
| AM19132-AS | usAfsgsguaCfacagGfgUfcUfccuasc | 1209 | UAGGUACACAGGGUCUCCUAC | 1649 |
| AM19181-AS | cPrpusCfaGfaauccugUfcUfuGfucausu | 1210 | UCAGAAUCCUGUCUUGUCAUU | 1578 |
| AM19182-AS | cPrpusCfagAfauccugUfcUfuGfucausu | 1211 | UCAGAAUCCUGUCUUGUCAUU | 1578 |
| AM19183-AS | cPrpusCfagaaUfccugUfcUfuGfucausu | 1212 | UCAGAAUCCUGUCUUGUCAUU | 1578 |
| AM19185-AS | cPrpasCfagaauccugUfcUfuGfucausu | 1213 | ACAGAAUCCUGUCUUGUCAUU | 1650 |
| AM19186-AS | asCfagaauccugUfcUfuGfucausu | 1214 | ACAGAAUCCUGUCUUGUCAUU | 1650 |
| AM19189-AS | cPrpusCfagaauccugUfcUfuGfucgusu | 1215 | UCAGAAUCCUGUCUUGUCGUU | 1651 |
| AM19191-AS | cPrpusCfagaauccugUfcUfuGfucausc | 1216 | UCAGAAUCCUGUCUUGUCAUC | 1652 |
| AM19193-AS | cPrpasCfaGfaauccugUfcUfuGfucausc | 1217 | ACAGAAUCCUGUCUUGUCAUC | 1653 |
| AM19219-AS | asGfsgsCfaUfcuaauAfuUfcCfaGfgasc | 1218 | AGGCAUCUAAUAUUCCAGGAC | 1654 |
| AM19221-AS | asGfscsAfuCfuaauaUfuCfcAfgGfacsa | 1219 | AGCAUCUAAUAUUCCAGGACA | 1655 |
| AM19223-AS | asAfsgsGfcAfucuaaUfaUfuCfcAfggsa | 1220 | AAGGCAUCUAAUAUUCCAGGA | 1656 |
| AM19405-AS | cPrpusGfuguuGfucauUfuUfuGfagaasc | 1221 | UGUGUUGUCAUUUUUGAGAAC | 1609 |
| AM19406-AS | cPrpusGfuGfuugucauUfuUfuGfagaasc | 1222 | UGUGUUGUCAUUUUUGAGAAC | 1609 |
| AM19407-AS | usAfsasucaAfaggaCfaAfaAfuggcsa | 1223 | UAAUCAAAGGACAAAAUGGCA | 1606 |
| AM19408-AS | cPrpusAfaucaAfaggaCfaAfaAfuggcsa | 1224 | UAAUCAAAGGACAAAAUGGCA | 1606 |
| AM19410-AS | usAfsasUfcaaaggaCfaAfaAfuggcsa | 1225 | UAAUCAAAGGACAAAAUGGCA | 1606 |
| AM19411-AS | cPrpusAfaUfcaaaggaCfaAfaAfuggcsa | 1226 | UAAUCAAAGGACAAAAUGGCA | 1606 |
| AM19536-AS | asCfagAfauccugUfcUfuGfucausu | 1227 | ACAGAAUCCUGUCUUGUCAUU | 1650 |
| AM19538-AS | asCfagAfauccugUfcUfuGfucgusu | 1228 | ACAGAAUCCUGUCUUGUCGUU | 1657 |
| AM19538.1-AS | isCfagAfauccugUfcUfuGfucgusu | 1229 | ICAGAAUCCUGUCUUGUCGUU | 1658 |
| AM19539-AS | asCfagAfauccugUfcUfuGfucausc | 1230 | ACAGAAUCCUGUCUUGUCAUC | 1653 |
| AM19656-AS | usUfsasggaAfauccAfaUfgCfugucsu | 1231 | UUAGGAAAUCCAAUGCUGUCU | 1604 |
| AM19657-AS | cPrpusUfsasggaAfauccAfaUfgCfugucsu | 1232 | UUAGGAAAUCCAAUGCUGUCU | 1604 |
| AM19658-AS | usAfsusugaAfgcauUfgAfgAfcaccsa | 1233 | UAUUGAAGCAUUGAGACACCA | 1560 |
| AM19659-AS | cPrpusAfuugaAfgcauUfgAfgAfcaccsa | 1234 | UAUUGAAGCAUUGAGACACCA | 1560 |
| AM19661-AS | usAfsusugaAfgcauUfgAfgAfcaccsg | 1235 | UAUUGAAGCAUUGAGACACCG | 1659 |
| AM19663-AS | usAfsusugaAfgcauUfgAfgAfcaucsg | 1236 | UAUUGAAGCAUUGAGACAUCG | 1660 |
| CA004443 | cPrpusCfagAfauccugUfcUfuGfucgusu | 1237 | UCAGAAUCCUGUCUUGUCGUU | 1651 |
| CA004444 | cPrpusCfagAfauccugUfcUfuGfucausc | 1238 | UCAGAAUCCUGUCUUGUCAUC | 1652 |
| CA004446 | cPrpusCfagAfauccugUfcUfuGfucgusc | 1239 | UCAGAAUCCUGUCUUGUCGUC | 1661 |
| CA004447 | cPrpusCfagAfaU_{UNA}ccugUfcUfuGfucgusu | 1240 | UCAGAAUCCUGUCUUGUCGUU | 1651 |
| CA004449 | usUfuaAfcuuucuUfcUfcUfagccsu | 1241 | UUUAACUUUCUUCUCUAGCCU | 1662 |
| CA004481 | usAfsgsaAfuccuguCfuUfgUfcauusc | 1242 | UAGAAUCCUGUCUUGUCAUUC | 1663 |
| CA004483 | usUfscsaGfaauccuGfuCfuUfgucasc | 1243 | UUCAGAAUCCUGUCUUGUCAC | 1664 |
| CA004798 | isCfagAfauccugUfcUfuGfucgusu | 1244 | ICAGAAUCCUGUCUUGUCGUU | 1658 |
| CA005198 | asGfsgcauCfuaauauUfcCfaggsusu | 1245 | AGGCAUCUAAUAUUCCAGGUU | 1665 |
| CA008056 | usCfuuUfguguagGfcUfgCfacugsa | 1246 | UCUUUGUGUAGGCUGCACUGA | 1585 |
| CA008057 | asAfcuCfuucaguGfuUfuCfcagcsg | 1247 | AACUCUUCAGUGUUUCCAGCG | 1591 |
| CA008058 | usAfggUfacacagGfgUfcUfcccasc | 1248 | UAGGUACACAGGGUCUCCCAC | 1596 |
| CA008429 | cPrpusGfaaagaacuaguCfcauaausc | 1249 | UGAAAGAACUAGUCCAUAAUC | 1666 |
| CA008430 | cPrpusGfaaaGfaacuaUfuCfcAfuaasusc | 1250 | UGAAAGAACUAUUCCAUAAUC | 1608 |
| CA915324 | asCfagAfauccugUfcUfuGfucgusu | 1251 | ACAGAAUCCUGUCUUGUCGUU | 1657 |

TABLE 4
MARC1 RNAi Agent Sense Strand Sequences (Shown Without Linkers,
Conjugates, or Capping Moieties).

| | | | Underlying Base Sequence | |
|---|---|---|---|---|
| | | SEQ | (5′ → 3′) | SEQ |
| MARCI | Modified Sense Strand | ID | (Shown as an Unmodified | ID |
| Strand ID | (5′ → 3′) | NO. | Nucleotide Sequence) | NO. |
| AM16711-SS-NL | accaggagGfGfAfaacaugguua | 1252 | ACCAGGAGGGAAACAUGGUUA | 1667 |
| AM16713-SS-NL | gauaaccaGfCfUfuccugaagua | 1253 | GAUAACCAGCUUCCUGAAGUA | 1668 |
| AM16715-SS-NL | caucaaauAfGfCfagacuuguua | 1254 | CAUCAAAUAGCAGACUUGUUA | 1669 |
| AM16717-SS-NL | ccaaauagCfAfGfacuuiuucca | 1255 | CCAAAUAGCAGACUUIUUCCA | 1670 |
| AM16719-SS-NL | gaggaccaGfAfUfugcuuacuca | 1256 | GAGGACCAGAUUGCUUACUCA | 1671 |
| AM16721-SS-NL | accagauuGfCfUfuacucagaca | 1257 | ACCAGAUUGCUUACUCAGACA | 1672 |
| AM16723-SS-NL | gauugcuuAfCfUfcagacaccaa | 1258 | GAUUGCUUACUCAGACACCAA | 1673 |
| AM16725-SS-NL | caggcuagAfGfAfagaaaguuaa | 1259 | CAGGCUAGAGAAGAAAGUUAA | 1674 |
| AM16727-SS-NL | guuccagaUfGfCfauuuuaacca | 1260 | GUUCCAGAUGCAUUUUAACCA | 1675 |
| AM16729-SS-NL | ugacccuuCfAfGfaacgaaaguu | 1261 | UGACCCUUCAGAACGAAAGUU | 1676 |
| AM16731-SS-NL | cagaacgaAfAfGfuuauauggaa | 1262 | CAGAACGAAAGUUAUAUGGAA | 1677 |
| AM16733-SS-NL | cgaaaguuAfUfAfuggaaaauca | 1263 | CGAAAGUUAUAUGGAAAAUCA | 1678 |
| AM16735-SS-NL | cauggaaaAfUfCfaccacucuuu | 1264 | CAUGGAAAAUCACCACUCUUU | 1679 |
| AM16737-SS-NL | guguccugGfAfAfuauuagauga | 1265 | GUGUCCUGGAAUAUUAGAUGA | 1680 |
| AM16739-SS-NL | guucucaaAfAfAfugacaacacu | 1266 | GUUCUCAAAAAUGACAACACU | 1681 |
| AM16741-SS-NL | gaugacaaCfAfCfuugaagcaua | 1267 | GAUGACAACACUUGAAGCAUA | 1682 |
| AM16743-SS-NL | gcaacacuUfGfAfagcauggugu | 1268 | GCAACACUUGAAGCAUGGUGU | 1683 |
| AM16745-SS-NL | gaagcaugGfUfGfuuucagaacu | 1269 | GAAGCAUGGUGUUUCAGAACU | 1684 |
| AM16747-SS-NL | uggugucuCfAfAfugcuucaaua | 1270 | UGGUGUCUCAAUGCUUCAAUA | 1685 |
| AM16749-SS-NL | cgucucaaUfGfCfuucaauguca | 1271 | CGUCUCAAUGCUUCAAUGUCA | 1686 |
| AM16751-SS-NL | ggacaggaUfUfCfugaaaacuca | 1272 | GGACAGGAUUCUGAAAACUCA | 1687 |
| AM16753-SS-NL | gcugauuaUfGfGfaauaguucuu | 1273 | GCUGAUUAUGGAAUAGUUCUU | 1688 |
| AM16755-SS-NL | gauuauggAfAfUfaguucuuucu | 1274 | GAUUAUGGAAUAGUUCUUUCU | 1689 |
| AM16757-SS-NL | guuuuccaUfAfGfaucuigaucu | 1275 | GUUUUCCAUAGAUCUIGAUCU | 1690 |
| AM16759-SS-NL | gcuucucaGfAfCfagcauuggau | 1276 | GCUUCUCAGACAGCAUUGGAU | 1691 |
| AM16761-SS-NL | ggcauuggAfUfUfuccuaaaggu | 1277 | GGCAUUGGAUUUCCUAAAGGU | 1692 |
| AM16763-SS-NL | cauuggauUfUfCfcuaaagguia | 1278 | CAUUGGAUUUCCUAAAGGUIA | 1693 |
| AM16765-SS-NL | caugucagUfUfGfuuuaaaacca | 1279 | CAUGUCAGUUGUUUAAAACCA | 1694 |
| AM16767-SS-NL | guaacucuAfAfGfaucugaugaa | 1280 | GUAACUCUAAGAUCUGAUGAA | 1695 |
| AM16769-SS-NL | caacucuaAfGfAfucugaugaaa | 1281 | CAACUCUAAGAUCUGAUGAAA | 1696 |
| AM16771-SS-NL | ugggaaguUfGfAfcuaaacuuga | 1282 | UGGGAAGUUGACUAAACUUGA | 1697 |
| AM16773-SS-NL | gcugugaaUfAfAfauggaagcua | 1283 | GCUGUGAAUAAAUGGAAGCUA | 1698 |
| AM17487-SS-NL | cagguuuuGfGfCfuugugaucaa | 1284 | CAGGUUUUGGCUUGUGAUCAA | 1699 |
| AM17489-SS-NL | uucaggauGfCfGfaugucuauga | 1285 | UUCAGGAUGCGAUGUCUAUGA | 1700 |
| AM17491-SS-NL | uggaaaauCfAfCfcacucuuuga | 1286 | UGGAAAAUCACCACUCUUUGA | 1701 |
| AM17493-SS-NL | uugaagcaUfGfGfuguuucagaa | 1287 | UUGAAGCAUGGUGUUUCAGAA | 1702 |
| AM17495-SS-NL | aaugacaaGfAfCfaggauucuga | 1288 | AAUGACAAGACAGGAUUCUGA | 1703 |
| AM17497-SS-NL | cugcuucuCfAfGfacagcauuga | 1289 | CUGCUUCUCAGACAGCAUUGA | 1704 |
| AM17499-SS-NL | cuacugaaAfAfCfcuuuaaagga | 1290 | CUACUGAAAACCUUUAAAGGA | 1705 |
| AM17501-SS-NL | acucuaagAfUfCfugaugaagua | 1291 | ACUCUAAGAUCUGAUGAAGUA | 1706 |
| AM17503-SS-NL | uugggaagUfUfGfacuaaacuua | 1292 | UUGGGAAGUUGACUAAACUUA | 1707 |
| AM17505-SS-NL | cugcuucuCfAfGfacaguauuga | 1293 | CUGCUUCUCAGACAGUAUUGA | 1708 |
| AM17807-SS-NL | acucucagUfGfCfagccuacaca | 1294 | ACUCUCAGUGCAGCCUACACA | 1709 |
| AM17809-SS-NL | cucucaguGfCfAfgccuacacaa | 1295 | CUCUCAGUGCAGCCUACACAA | 1710 |
| AM17811-SS-NL | ucagugcaGfCfCfuacacaaaga | 1296 | UCAGUGCAGCCUACACAAAGA | 1711 |
| AM17813-SS-NL | agugcagcCfUfAfcacaaaggaa | 1297 | AGUGCAGCCUACACAAAGGAA | 1712 |
| AM17815-SS-NL | uaccgccuGfGfUfgcacuucgaa | 1298 | UACCGCCUGGUGCACUUCGAA | 1713 |
| AM17817-SS-NL | accgccugGfUfGfcacuucgaga | 1299 | ACCGCCUGGUGCACUUCGAGA | 1714 |
| AM17819-SS-NL | ccgccuggUfGfCfacuucgagca | 1300 | CCGCCUGGUGCACUUCGAGCA | 1715 |
| AM17821-SS-NL | cgccugguGfCfAfcuucgagccu | 1301 | CGCCUGGUGCACUUCGAGCCU | 1716 |
| AM17823-SS-NL | cgcuggaaAfCfAfcugaagaguu | 1302 | CGCUGGAAACACUGAAGAGUU | 1717 |
| AM17825-SS-NL | aucaaaguGfGfGfagacccugua | 1303 | AUCAAAGUGGGAGACCCUGUA | 1718 |
| AM17827-SS-NL | ucaaagugGfGfAfgacccugugu | 1304 | UCAAAGUGGGAGACCCUGUGU | 1719 |
| AM17829-SS-NL | aagugggaGfAfCfccuguguaca | 1305 | AAGUGGGAGACCCUGUGUACA | 1720 |
| AM17831-SS-NL | agugggagAfCfCfcuguguaccu | 1306 | AGUGGGAGACCCUGUGUACCU | 1721 |
| AM17833-SS-NL | gugggagaCfCfCfuguguaccua | 1307 | GUGGGAGACCCUGUGUACCUA | 1722 |
| AM17863-SS-NL | aucaaauaGfCfAfgacuuguuca | 1308 | AUCAAAUAGCAGACUUGUUCA | 1723 |
| AM17865-SS-NL | cuagagaaGfAfAfaguuaaagca | 1309 | CUAGAGAAGAAAGUUAAAGCA | 1724 |
| AM17867-SS-NL | agagaagaAfAfGfuuaaagcaaa | 1310 | AGAGAAGAAAGUUAAAGCAAA | 1725 |
| AM17869-SS-NL | aggcccaaUfAfUfuguaauuuca | 1311 | AGGCCCAAUAUUGUAAUUUCA | 1726 |
| AM17871-SS-NL | gacccuucAfGfAfacgaaaguua | 1312 | GACCCUUCAGAACGAAAGUUA | 1727 |
| AM17873-SS-NL | uucagaacGfAfAfaguuauauga | 1313 | UUCAGAACGAAAGUUAUAUGA | 1728 |
| AM17875-SS-NL | cccguuuaAfCfUfgauuauggaa | 1314 | CCCGUUUAACUGAUUAUGGAA | 1729 |
| AM17877-SS-NL | agacagcaUfUfGfgauuuccuaa | 1315 | AGACAGCAUUGGAUUUCCUAA | 1730 |
| AM17879-SS-NL | uuauugccAfUfUfuuguccuuua | 1316 | UUAUUGCCAUUUUGUCCUUUA | 1731 |
| AM17881-SS-NL | ugccauuuUfGfUfccuuugauua | 1317 | UGCCAUUUUGUCCUUUGAUUA | 1732 |
| AM18392-SS-NL | ccacugaaAfAfCfcuuuaaagga | 1318 | CCACUGAAAACCUUUAAAGGA | 1733 |
| AM18400-SS-NL | gauuauggAfAfUfaguucuuuca | 1319 | GAUUAUGGAAUAGUUCUUUCA | 1734 |
| AM18406-SS-NL | guucucaaAfAfAfugacaacaca | 1320 | GUUCUCAAAAAUGACAACACA | 1735 |
| AM18613-SS-NL | agguuuugGfCfUfugugaucaaa | 1321 | AGGUUUUGGCUUGUGAUCAAA | 1736 |
| AM18615-SS-NL | gguuuuggCfUfUfgugaucaaca | 1322 | GGUUUUGGCUUGUGAUCAACA | 1737 |
| AM18630-SS-NL | gauuauggAfaUfaGfuucuuucu | 1323 | GAUUAUGGAAUAGUUCUUUCU | 1689 |
| AM18631-SS-NL | gauuauggAfaUfaguucuuucu | 1324 | GAUUAUGGAAUAGUUCUUUCU | 1689 |
| AM18633-SS-NL | auuauggaAfUfAfguucuuucua | 1325 | AUUAUGGAAUAGUUCUUUCUA | 1738 |
| AM18635-SS-NL | acuauggaAfUfAfguucuuucua | 1326 | ACUAUGGAAUAGUUCUUUCUA | 1739 |
| AM18637-SS-NL | gcuauggaAfUfAfguucuuucua | 1327 | GCUAUGGAAUAGUUCUUUCUA | 1740 |
| AM18877-SS-NL | ugacuaguUfUfCfagaucuuacu | 1328 | UGACUAGUUUCAGAUCUUACU | 1741 |
| AM18879-SS-NL | uaguuucaGfAfUfcuuacuaacu | 1329 | UAGUUUCAGAUCUUACUAACU | 1742 |
| AM18881-SS-NL | guuucagaUfCfUfuacuaacuua | 1330 | GUUUCAGAUCUUACUAACUUA | 1743 |
| AM18883-SS-NL | gugcauguGfCfUfuguuuuauga | 1331 | GUGCAUGUGCUUGUUUUAUGA | 1744 |
| AM18885-SS-NL | gagacaaaGfCfGfaaguguucaa | 1332 | GAGACAAAGCGAAGUGUUCAA | 1745 |
| AM18887-SS-NL | uuccagugAfCfCfucuagaaucu | 1333 | UUCCAGUGACCUCUAGAAUCU | 1746 |
| AM18889-SS-NL | gagcauuuGfCfAfcacuauucca | 1334 | GAGCAUUUGCACACUAUUCCA | 1747 |
| AM18891-SS-NL | augacagaUfGfUfuugagaucaa | 1335 | AUGACAGAUGUUUGAGAUCAA | 1748 |
| AM18893-SS-NL | ucugugugGfCfAfacuuaugcua | 1336 | UCUGUGUGGCAACUUAUGCUA | 1749 |
| AM18895-SS-NL | cagaccagAfCfCfuugauuguga | 1337 | CAGACCAGACCUUGAUUGUGA | 1750 |
| AM18897-SS-NL | agggagaaGfCfAfcucucuuucu | 1338 | AGGGAGAAGCACUCUCUUUCU | 1751 |
| AM18899-SS-NL | gaaaccaaAfCfUfcucucuaaca | 1339 | GAAACCAAACUCUCUCUAACA | 1752 |
| AM18901-SS-NL | accaaacuCfUfCfucuaaccuua | 1340 | ACCAAACUCUCUCUAACCUUA | 1753 |
| AM18903-SS-NL | gugauguaAfGfUfuacaaaacca | 1341 | GUGAUGUAAGUUACAAAACCA | 1754 |
| AM18905-SS-NL | aaccaccuGfUfGfaugaaaguga | 1342 | AACCACCUGUGAUGAAAGUGA | 1755 |
| AM18907-SS-NL | ugacugguGfCfAfuuuauaauca | 1343 | UGACUGGUGCAUUUAUAAUCA | 1756 |
| AM18909-SS-NL | acagcucuGfAfCfuauaacucua | 1344 | ACAGCUCUGACUAUAACUCUA | 1757 |
| AM18911-SS-NL | uaccuuuaCfAfGfagcauccuaa | 1345 | UACCUUUACAGAGCAUCCUAA | 1758 |
| AM18913-SS-NL | ggaacuaaGfUfUfaagucuaacu | 1346 | GGAACUAAGUUAAGUCUAACU | 1759 |
| AM18915-SS-NL | cucagagaGfAfUfugaauuuacu | 1347 | CUCAGAGAGAUUGAAUUUACU | 1760 |
| AM18917-SS-NL | cagcucugGfUfUfaacaucaaca | 1348 | CAGCUCUGGUUAACAUCAACA | 1761 |
| AM18919-SS-NL | guugaccuGfAfCfaucauaguuu | 1349 | GUUGACCUGACAUCAUAGUUU | 1762 |
| AM18921-SS-NL | ucaaacagAfUfCfucguuaaugu | 1350 | UCAAACAGAUCUCGUUAAUGU | 1763 |
| AM18923-SS-NL | guucuuaaAfGfCfuauauucuga | 1351 | GUUCUUAAAGCUAUAUUCUGA | 1764 |
| AM18943-SS-NL | cuacacaaAfGfGfaccuacuacu | 1352 | CUACACAAAGGACCUACUACU | 1765 |
| AM18945-SS-NL | gacguccuCfAfUfcaaauagcaa | 1353 | GACGUCCUCAUCAAAUAGCAA | 1766 |
| AM18947-SS-NL | ucagaacuGfAfGfaccucuacau | 1354 | UCAGAACUGAGACCUCUACAU | 1767 |
| AM18949-SS-NL | ugagaccuCfUfAfcauuuucuuu | 1355 | UGAGACCUCUACAUUUUCUUU | 1768 |
| AM18951-SS-NL | ugugauuuUfCfAfcauuuuucgu | 1356 | UGUGAUUUUCACAUUUUUCGU | 1769 |
| AM18953-SS-NL | aacuuaguAfGfGfacuucaguaa | 1357 | AACUUAGUAGGACUUCAGUAA | 1770 |
| AM18955-SS-NL | cuccugcuUfCfUfccguuuaucu | 1358 | CUCCUGCUUCUCCGUUUAUCU | 1771 |
| AM18957-SS-NL | uggaagaaUfAfUfccuagaaugu | 1359 | UGGAAGAAUAUCCUAGAAUGU | 1772 |
| AM18959-SS-NL | aaggaaagCfAfUfaugucaguua | 1360 | AAGGAAAGCAUAUGUCAGUUA | 1773 |
| AM19119-SS-NL | cuacugaaAfAfCfcuuuaaaiga | 1361 | CUACUGAAAACCUUUAAAIGA | 1774 |
| AM19124-SS-NL | cuacugaaAfaCfcUfuuaaagga | 1362 | CUACUGAAAACCUUUAAAGGA | 1705 |
| AM19129-SS-NL | gugggagaCfcCfuGfuguaccua | 1363 | GUGGGAGACCCUGUGUACCUA | 1722 |
| AM19130-SS-NL | gugggagaCfCfCfuguguaucua | 1364 | GUGGGAGACCCUGUGUAUCUA | 1775 |
| AM19184-SS-NL | aaugacaaGfAfCfaggauucugu | 1365 | AAUGACAAGACAGGAUUCUGU | 1776 |
| AM19187-SS-NL | aaugacaaGfaCfaGfgauucuga | 1366 | AAUGACAAGACAGGAUUCUGA | 1703 |
| AM19188-SS-NL | aacgacaaGfAfCfaggauucuga | 1367 | AACGACAAGACAGGAUUCUGA | 1777 |
| AM19190-SS-NL | gaugacaaGfAfCfaggauucuga | 1368 | GAUGACAAGACAGGAUUCUGA | 1778 |
| AM19192-SS-NL | gaugacaaGfaCfaGfgauucugu | 1369 | GAUGACAAGACAGGAUUCUGU | 1779 |
| AM19194-SS-NL | gaugacaaGfAfCfaggauucugu | 1370 | GAUGACAAGACAGGAUUCUGU | 1779 |
| AM19218-SS-NL | guccuggaAfUfAfuuagaugccu | 1371 | GUCCUGGAAUAUUAGAUGCCU | 1780 |
| AM19220-SS-NL | uguccuggAfAfUfauuagaugcu | 1372 | UGUCCUGGAAUAUUAGAUGCU | 1781 |
| AM19222-SS-NL | uccuggaaUfAfUfuagaugccuu | 1373 | UCCUGGAAUAUUAGAUGCCUU | 1782 |
| AM19404-SS-NL | guucucaaAfaAfuGfacaacaca | 1374 | GUUCUCAAAAAUGACAACACA | 1735 |
| AM19409-SS-NL | ugccauuuUfgUfcCfuuugauua | 1375 | UGCCAUUUUGUCCUUUGAUUA | 1732 |
| AM19537-SS-NL | aacgacaaGfAfCfaggauucugu | 1376 | AACGACAAGACAGGAUUCUGU | 1783 |
| AM19660-SS-NL | cggugucuCfAfAfugcuucaaua | 1377 | CGGUGUCUCAAUGCUUCAAUA | 1784 |
| AM19662-SS-NL | cgaugucuCfAfAfugcuucaaua | 1378 | CGAUGUCUCAAUGCUUCAAUA | 1785 |
| CS004445-NL | gacgacaaGfAfCfaggauucuga | 1379 | GACGACAAGACAGGAUUCUGA | 1786 |
| CS004448-NL | aggcuagaGfAfAfgaaaguuaaa | 1380 | AGGCUAGAGAAGAAAGUUAAA | 1787 |
| CS004480-NL | gaaugacaAfGfAfcaggauucua | 1381 | GAAUGACAAGACAGGAUUCUA | 1788 |
| CS004482-NL | gugacaagAfCfAfggauucugaa | 1382 | GUGACAAGACAGGAUUCUGAA | 1789 |
| CS005197-NL | ccuggaAfuAfUfUfAfgaugccuu | 1383 | CCUGGAAUAUUAGAUGCCUU | 1790 |
| CS008428-NL | gauuauggAfAfUfaggucuuuca | 1389 | GAUUAUGGAAUAGGUCUUUCA | 1791 |
| CS913717-NL | ucagugcaGfCfCfuacacaaaga | 1390 | UCAGUGCAGCCUACACAAAGA | 1711 |
| CS913729-NL | cgcuggaaAfCfAfcugaagaguu | 1391 | CGCUGGAAACACUGAAGAGUU | 1717 |
| CS913739-NL | gugggagaCfCfCfuguguaccua | 1392 | GUGGGAGACCCUGUGUACCUA | 1722 |
| CS914289-NL | gauuauggAfAfUfaguucuuuca | 1393 | GAUUAUGGAAUAGUUCUUUCA | 1734 |
| CS914989-NL | aacgacaaGfAfCfaggauucuga | 1394 | AACGACAAGACAGGAUUCUGA | 1777 |
| CS914991-NL | gaugacaaGfAfCfaggauucuga | 1395 | GAUGACAAGACAGGAUUCUGA | 1778 |
| CS915323-NL | aacgacaaGfAfCfaggauucugu | 1396 | AACGACAAGACAGGAUUCUGU | 1783 |

(A^{2N})=2-aminoadenosine nucleotide; I = hypoxanthine (inosine) nucleotide

TABLE 5
MARC1 RNAi Agent Sense Strand Sequences (Shown With (NAG37) Targeting Ligand (see Table 7 for structure information)).

| | | | Underlying Base Sequence (5′→3′) | |
|---|---|---|---|---|
| | | | (Shown as an Unmodified | |
| Strand ID | Modified Sense Strand (5′→3′) | SEQ ID NO. | Nucleotide Sequence) | SEQ ID NO. |
| AM16711-SS | (NAG37)s(invAb)saccaggagGfGfAfaacaugguuas(invAb) | 1397 | ACCAGGAGGGAAACAUGGUUA | 1667 |
| AM16713-SS | (NAG37)s(invAb)sgauaaccaGfCfUfuccugaaguas(invAb) | 1398 | GAUAACCAGCUUCCUGAAGUA | 1668 |
| AM16715-SS | (NAG37)s(invAb)scaucaaauAfGfCfagacuuguuas(invAb) | 1399 | CAUCAAAUAGCAGACUUGUUA | 1669 |
| AM16717-SS | (NAG37)s(invAb)sccaaauagCfAfGfacuuiuuccas(invAb) | 1400 | CCAAAUAGCAGACUUIUUCCA | 1670 |
| AM16719-SS | (NAG37)s(invAb)sgaggaccaGfAfUfugcuuacucas(invAb) | 1401 | GAGGACCAGAUUGCUUACUCA | 1671 |
| AM16721-SS | (NAG37)s(invAb)saccagauuGfCfUfuacucagacas(invAb) | 1402 | ACCAGAUUGCUUACUCAGACA | 1672 |
| AM16723-SS | (NAG37)s(invAb)sgauugcuuAfCfUfcagacaccaas(invAb) | 1403 | GAUUGCUUACUCAGACACCAA | 1673 |
| AM16725-SS | (NAG37)s(invAb)scaggcuagAfGfAfagaaaguuaas(invAb) | 1404 | CAGGCUAGAGAAGAAAGUUAA | 1674 |
| AM16727-SS | (NAG37)s(invAb)sguuccagaUfGfCfauuuuaaccas(invAb) | 1405 | GUUCCAGAUGCAUUUUAACCA | 1675 |
| AM16729-SS | (NAG37)s(invAb)sugacccuuCfAfGfaacgaaaguus(invAb) | 1406 | UGACCCUUCAGAACGAAAGUU | 1676 |
| AM16731-SS | (NAG37)s(invAb)scagaacgaAfAfGfuuauauggaas(invAb) | 1407 | CAGAACGAAAGUUAUAUGGAA | 1677 |
| AM16733-SS | (NAG37)s(invAb)scgaaaguuAfUfAfuggaaaaucas(invAb) | 1408 | CGAAAGUUAUAUGGAAAAUCA | 1678 |
| AM16735-SS | (NAG37)s(invAb)scauggaaaAfUfCfaccacucuuus(invAb) | 1409 | CAUGGAAAAUCACCACUCUUU | 1679 |
| AM16737-SS | (NAG37)s(invAb)sguguccugGfAfAfuauuagaugas(invAb) | 1410 | GUGUCCUGGAAUAUUAGAUGA | 1680 |
| AM16739-SS | (NAG37)s(invAb)sguucucaaAfAfAfugacaacacus(invAb) | 1411 | GUUCUCAAAAAUGACAACACU | 1681 |
| AM16741-SS | (NAG37)s(invAb)sgaugacaaCfAfCfuugaagcauas(invAb) | 1412 | GAUGACAACACUUGAAGCAUA | 1682 |
| AM16743-SS | (NAG37)s(invAb)sgcaacacuUfGfAfagcauggugus(invAb) | 1413 | GCAACACUUGAAGCAUGGUGU | 1683 |
| AM16745-SS | (NAG37)s(invAb)sgaagcaugGfUfGfuuucagaacus(invAb) | 1414 | GAAGCAUGGUGUUUCAGAACU | 1684 |
| AM16747-SS | (NAG37)s(invAb)suggugucuCfAfAfugcuucaauas(invAb) | 1415 | UGGUGUCUCAAUGCUUCAAUA | 1685 |
| AM16749-SS | (NAG37)s(invAb)scgucucaaUfGfCfuucaaugucas(invAb) | 1416 | CGUCUCAAUGCUUCAAUGUCA | 1686 |
| AM16751-SS | (NAG37)s(invAb)sggacaggaUfUfCfugaaaacucas(invAb) | 1417 | GGACAGGAUUCUGAAAACUCA | 1687 |
| AM16753-SS | (NAG37)s(invAb)sgcugauuaUfGfGfaauaguucuus(invAb) | 1418 | GCUGAUUAUGGAAUAGUUCUU | 1688 |
| AM16755-SS | (NAG37)s(invAb)sgauuauggAfAfUfaguucuuucus(invAb) | 1419 | GAUUAUGGAAUAGUUCUUUCU | 1689 |
| AM16757-SS | (NAG37)s(invAb)sguuuuccaUfAfGfaucuigaucus(invAb) | 1420 | GUUUUCCAUAGAUCUIGAUCU | 1690 |
| AM16759-SS | (NAG37)s(invAb)sgcuucucaGfAfCfagcauuggaus(invAb) | 1421 | GCUUCUCAGACAGCAUUGGAU | 1691 |
| AM16761-SS | (NAG37)s(invAb)sggcauuggAfUfUfuccuaaaggus(invAb) | 1422 | GGCAUUGGAUUUCCUAAAGGU | 1692 |
| AM16763-SS | (NAG37)s(invAb)scauuggauUfUfCfcuaaagguias(invAb) | 1423 | CAUUGGAUUUCCUAAAGGUIA | 1693 |
| AM16765-SS | (NAG37)s(invAb)scaugucagUfUfGfuuuaaaaccas(invAb) | 1424 | CAUGUCAGUUGUUUAAAACCA | 1694 |
| AM16767-SS | (NAG37)s(invAb)sguaacucuAfAfGfaucugaugaas(invAb) | 1425 | GUAACUCUAAGAUCUGAUGAA | 1695 |
| AM16769-SS | (NAG37)s(invAb)scaacucuaAfGfAfucugaugaaas(invAb) | 1426 | CAACUCUAAGAUCUGAUGAAA | 1696 |
| AM16771-SS | (NAG37)s(invAb)sugggaaguUfGfAfcuaaacuugas(invAb) | 1427 | UGGGAAGUUGACUAAACUUGA | 1697 |
| AM16773-SS | (NAG37)s(invAb)sgcugugaaUfAfAfauggaagcuas(invAb) | 1428 | GCUGUGAAUAAAUGGAAGCUA | 1698 |
| AM17487-SS | (NAG37)s(invAb)scagguuuuGfGfCfuugugaucaas(invAb) | 1429 | CAGGUUUUGGCUUGUGAUCAA | 1699 |
| AM17489-SS | (NAG37)s(invAb)suucaggauGfCfGfaugucuaugas(invAb) | 1430 | UUCAGGAUGCGAUGUCUAUGA | 1700 |
| AM17491-SS | (NAG37)s(invAb)suggaaaauCfAfCfcacucuuugas(invAb) | 1431 | UGGAAAAUCACCACUCUUUGA | 1701 |
| AM17493-SS | (NAG37)s(invAb)suugaagcaUfGfGfuguuucagaas(invAb) | 1432 | UUGAAGCAUGGUGUUUCAGAA | 1702 |
| AM17495-SS | (NAG37)s(invAb)saaugacaaGfAfCfaggauucugas(invAb) | 1433 | AAUGACAAGACAGGAUUCUGA | 1703 |
| AM17497-SS | (NAG37)s(invAb)scugcuucuCfAfGfacagcauugas(invAb) | 1434 | CUGCUUCUCAGACAGCAUUGA | 1704 |
| AM17499-SS | (NAG37)s(invAb)scuacugaaAfAfCfcuuuaaaggas(invAb) | 1435 | CUACUGAAAACCUUUAAAGGA | 1705 |
| AM17501-SS | (NAG37)s(invAb)sacucuaagAfUfCfugaugaaguas(invAb) | 1436 | ACUCUAAGAUCUGAUGAAGUA | 1706 |
| AM17503-SS | (NAG37)s(invAb)suugggaagUfUfGfacuaaacuuas(invAb) | 1437 | UUGGGAAGUUGACUAAACUUA | 1707 |
| AM17505-SS | (NAG37)s(invAb)scugcuucuCfAfGfacaguauugas(invAb) | 1438 | CUGCUUCUCAGACAGUAUUGA | 1708 |
| AM17807-SS | (NAG37)s(invAb)sacucucagUfGfCfagccuacacas(invAb) | 1439 | ACUCUCAGUGCAGCCUACACA | 1709 |
| AM17809-SS | (NAG37)s(invAb)scucucaguGfCfAfgccuacacaas(invAb) | 1440 | CUCUCAGUGCAGCCUACACAA | 1710 |
| AM17811-SS | (NAG37)s(invAb)sucagugcaGfCfCfuacacaaagas(invAb) | 1441 | UCAGUGCAGCCUACACAAAGA | 1711 |
| AM17813-SS | (NAG37)s(invAb)sagugcagcCfUfAfcacaaaggaas(invAb) | 1442 | AGUGCAGCCUACACAAAGGAA | 1712 |
| AM17815-SS | (NAG37)s(invAb)suaccgccuGfGfUfgcacuucgaas(invAb) | 1443 | UACCGCCUGGUGCACUUCGAA | 1713 |
| AM17817-SS | (NAG37)s(invAb)saccgccugGfUfGfcacuucgagas(invAb) | 1444 | ACCGCCUGGUGCACUUCGAGA | 1714 |
| AM17819-SS | (NAG37)s(invAb)sccgccuggUfGfCfacuucgagcas(invAb) | 1445 | CCGCCUGGUGCACUUCGAGCA | 1715 |
| AM17821-SS | (NAG37)s(invAb)scgccugguGfCfAfcuucgagccus(invAb) | 1446 | CGCCUGGUGCACUUCGAGCCU | 1716 |
| AM17823-SS | (NAG37)s(invAb)scgcuggaaAfCfAfcugaagaguus(invAb) | 1447 | CGCUGGAAACACUGAAGAGUU | 1717 |
| AM17825-SS | (NAG37)s(invAb)saucaaaguGfGfGfagacccuguas(invAb) | 1448 | AUCAAAGUGGGAGACCCUGUA | 1718 |
| AM17827-SS | (NAG37)s(invAb)sucaaagugGfGfAfgacccugugus(invAb) | 1449 | UCAAAGUGGGAGACCCUGUGU | 1719 |
| AM17829-SS | (NAG37)s(invAb)saagugggaGfAfCfccuguguacas(invAb) | 1450 | AAGUGGGAGACCCUGUGUACA | 1720 |
| AM17831-SS | (NAG37)s(invAb)sagugggagAfCfCfcuguguaccus(invAb) | 1451 | AGUGGGAGACCCUGUGUACCU | 1721 |
| AM17833-SS | (NAG37)s(invAb)sgugggagaCfCfCfuguguaccuas(invAb) | 1452 | GUGGGAGACCCUGUGUACCUA | 1722 |
| AM17863-SS | (NAG37)s(invAb)saucaaauaGfCfAfgacuuguucas(invAb) | 1453 | AUCAAAUAGCAGACUUGUUCA | 1723 |
| AM17865-SS | (NAG37)s(invAb)scuagagaaGfAfAfaguuaaagcas(invAb) | 1454 | CUAGAGAAGAAAGUUAAAGCA | 1724 |
| AM17867-SS | (NAG37)s(invAb)sagagaagaAfAfGfuuaaagcaaas(invAb) | 1455 | AGAGAAGAAAGUUAAAGCAAA | 1725 |
| AM17869-SS | (NAG37)s(invAb)saggcccaaUfAfUfuguaauuucas(invAb) | 1456 | AGGCCCAAUAUUGUAAUUUCA | 1726 |
| AM17871-SS | (NAG37)s(invAb)sgacccuucAfGfAfacgaaaguuas(invAb) | 1457 | GACCCUUCAGAACGAAAGUUA | 1727 |
| AM17873-SS | (NAG37)s(invAb)suucagaacGfAfAfaguuauaugas(invAb) | 1458 | UUCAGAACGAAAGUUAUAUGA | 1728 |
| AM17875-SS | (NAG37)s(invAb)scccguuuaAfCfUfgauuauggaas(invAb) | 1459 | CCCGUUUAACUGAUUAUGGAA | 1729 |
| AM17877-SS | (NAG37)s(invAb)sagacagcaUfUfGfgauuuccuaas(invAb) | 1460 | AGACAGCAUUGGAUUUCCUAA | 1730 |
| AM17879-SS | (NAG37)s(invAb)suuauugccAfUfUfuuguccuuuas(invAb) | 1461 | UUAUUGCCAUUUUGUCCUUUA | 1731 |
| AM17881-SS | (NAG37)s(invAb)sugccauuuUfGfUfccuuugauuas(invAb) | 1462 | UGCCAUUUUGUCCUUUGAUUA | 1732 |
| AM18392-SS | (NAG37)s(invAb)sccacugaaAfAfCfcuuuaaaggas(invAb) | 1463 | CCACUGAAAACCUUUAAAGGA | 1733 |
| AM18400-SS | (NAG37)s(invAb)sgauuauggAfAfUfaguucuuucas(invAb) | 1464 | GAUUAUGGAAUAGUUCUUUCA | 1734 |
| AM18406-SS | (NAG37)s(invAb)sguucucaaAfAfAfugacaacacas(invAb) | 1465 | GUUCUCAAAAAUGACAACACA | 1735 |
| AM18613-SS | (NAG37)s(invAb)sagguuuugGfCfUfugugaucaaas(invAb) | 1466 | AGGUUUUGGCUUGUGAUCAAA | 1736 |
| AM18615-SS | (NAG37)s(invAb)sgguuuuggCfUfUfgugaucaacas(invAb) | 1467 | GGUUUUGGCUUGUGAUCAACA | 1737 |
| AM18630-SS | (NAG37)s(invAb)sgauuauggAfaUfaGfuucuuucus(invAb) | 1468 | GAUUAUGGAAUAGUUCUUUCU | 1689 |
| AM18631-SS | (NAG37)s(invAb)sgauuauggAfaUfaguucuuucus(invAb) | 1469 | GAUUAUGGAAUAGUUCUUUCU | 1689 |
| AM18633-SS | (NAG37)s(invAb)sauuauggaAfUfAfguucuuucuas(invAb) | 1470 | AUUAUGGAAUAGUUCUUUCUA | 1738 |
| AM18635-SS | (NAG37)s(invAb)sacuauggaAfUfAfguucuuucuas(invAb) | 1471 | ACUAUGGAAUAGUUCUUUCUA | 1739 |
| AM18637-SS | (NAG37)s(invAb)sgcuauggaAfUfAfguucuuucuas(invAb) | 1472 | GCUAUGGAAUAGUUCUUUCUA | 1740 |
| AM18877-SS | (NAG37)s(invAb)sugacuaguUfUfCfagaucuuacus(invAb) | 1473 | UGACUAGUUUCAGAUCUUACU | 1741 |
| AM18879-SS | (NAG37)s(invAb)suaguuucaGfAfUfcuuacuaacus(invAb) | 1474 | UAGUUUCAGAUCUUACUAACU | 1742 |
| AM18881-SS | (NAG37)s(invAb)sguuucagaUfCfUfuacuaacuuas(invAb) | 1475 | GUUUCAGAUCUUACUAACUUA | 1743 |
| AM18883-SS | (NAG37)s(invAb)sgugcauguGfCfUfuguuuuaugas(invAb) | 1476 | GUGCAUGUGCUUGUUUUAUGA | 1744 |
| AM18885-SS | (NAG37)s(invAb)sgagacaaaGfCfGfaaguguucaas(invAb) | 1477 | GAGACAAAGCGAAGUGUUCAA | 1745 |
| AM18887-SS | (NAG37)s(invAb)suuccagugAfCfCfucuagaaucus(invAb) | 1478 | UUCCAGUGACCUCUAGAAUCU | 1746 |
| AM18889-SS | (NAG37)s(invAb)sgagcauuuGfCfAfcacuauuccas(invAb) | 1479 | GAGCAUUUGCACACUAUUCCA | 1747 |
| AM18891-SS | (NAG37)s(invAb)saugacagaUfGfUfuugagaucaas(invAb) | 1480 | AUGACAGAUGUUUGAGAUCAA | 1748 |
| AM18893-SS | (NAG37)s(invAb)sucugugugGfCfAfacuuaugcuas(invAb) | 1481 | UCUGUGUGGCAACUUAUGCUA | 1749 |
| AM18895-SS | (NAG37)s(invAb)scagaccagAfCfCfuugauugugas(invAb) | 1482 | CAGACCAGACCUUGAUUGUGA | 1750 |
| AM18897-SS | (NAG37)s(invAb)sagggagaaGfCfAfcucucuuucus(invAb) | 1483 | AGGGAGAAGCACUCUCUUUCU | 1751 |
| AM18899-SS | (NAG37)s(invAb)sgaaaccaaAfCfUfcucucuaacas(invAb) | 1484 | GAAACCAAACUCUCUCUAACA | 1752 |
| AM18901-SS | (NAG37)s(invAb)saccaaacuCfUfCfucuaaccuuas(invAb) | 1485 | ACCAAACUCUCUCUAACCUUA | 1753 |
| AM18903-SS | (NAG37)s(invAb)sgugauguaAfGfUfuacaaaaccas(invAb) | 1486 | GUGAUGUAAGUUACAAAACCA | 1754 |
| AM18905-SS | (NAG37)s(invAb)saaccaccuGfUfGfaugaaagugas(invAb) | 1487 | AACCACCUGUGAUGAAAGUGA | 1755 |
| AM18907-SS | (NAG37)s(invAb)sugacugguGfCfAfuuuauaaucas(invAb) | 1488 | UGACUGGUGCAUUUAUAAUCA | 1756 |
| AM18909-SS | (NAG37)s(invAb)sacagcucuGfAfCfuauaacucuas(invAb) | 1489 | ACAGCUCUGACUAUAACUCUA | 1757 |
| AM18911-SS | (NAG37)s(invAb)suaccuuuaCfAfGfagcauccuaas(invAb) | 1490 | UACCUUUACAGAGCAUCCUAA | 1758 |
| AM18913-SS | (NAG37)s(invAb)sggaacuaaGfUfUfaagucuaacus(invAb) | 1491 | GGAACUAAGUUAAGUCUAACU | 1759 |
| AM18915-SS | (NAG37)s(invAb)scucagagaGfAfUfugaauuuacus(invAb) | 1492 | CUCAGAGAGAUUGAAUUUACU | 1760 |
| AM18917-SS | (NAG37)s(invAb)scagcucugGfUfUfaacaucaacas(invAb) | 1493 | CAGCUCUGGUUAACAUCAACA | 1761 |
| AM18919-SS | (NAG37)s(invAb)sguugaccuGfAfCfaucauaguuus(invAb) | 1494 | GUUGACCUGACAUCAUAGUUU | 1762 |
| AM18921-SS | (NAG37)s(invAb)sucaaacagAfUfCfucguuaaugus(invAb) | 1495 | UCAAACAGAUCUCGUUAAUGU | 1763 |
| AM18923-SS | (NAG37)s(invAb)sguucuuaaAfGfCfuauauucugas(invAb) | 1496 | GUUCUUAAAGCUAUAUUCUGA | 1764 |
| AM18943-SS | (NAG37)s(invAb)scuacacaaAfGfGfaccuacuacus(invAb) | 1497 | CUACACAAAGGACCUACUACU | 1765 |
| AM18945-SS | (NAG37)s(invAb)sgacguccuCfAfUfcaaauagcaas(invAb) | 1498 | GACGUCCUCAUCAAAUAGCAA | 1766 |
| AM18947-SS | (NAG37)s(invAb)sucagaacuGfAfGfaccucuacaus(invAb) | 1499 | UCAGAACUGAGACCUCUACAU | 1767 |
| AM18949-SS | (NAG37)s(invAb)sugagaccuCfUfAfcauuuucuuus(invAb) | 1500 | UGAGACCUCUACAUUUUCUUU | 1768 |
| AM18951-SS | (NAG37)s(invAb)sugugauuuUfCfAfcauuuuucgus(invAb) | 1501 | UGUGAUUUUCACAUUUUUCGU | 1769 |
| AM18953-SS | (NAG37)s(invAb)saacuuaguAfGfGfacuucaguaas(invAb) | 1502 | AACUUAGUAGGACUUCAGUAA | 1770 |
| AM18955-SS | (NAG37)s(invAb)scuccugcuUfCfUfccguuuaucus(invAb) | 1503 | CUCCUGCUUCUCCGUUUAUCU | 1771 |
| AM18957-SS | (NAG37)s(invAb)suggaagaaUfAfUfccuagaaugus(invAb) | 1504 | UGGAAGAAUAUCCUAGAAUGU | 1772 |
| AM18959-SS | (NAG37)s(invAb)saaggaaagCfAfUfaugucaguuas(invAb) | 1505 | AAGGAAAGCAUAUGUCAGUUA | 1773 |
| AM19119-SS | (NAG37)s(invAb)scuacugaaAfAfCfcuuuaaaigas(invAb) | 1506 | CUACUGAAAACCUUUAAAIGA | 1774 |
| AM19124-SS | (NAG37)s(invAb)scuacugaaAfaCfcUfuuaaaggas(invAb) | 1507 | CUACUGAAAACCUUUAAAGGA | 1705 |
| AM19129-SS | (NAG37)s(invAb)sgugggagaCfcCfuGfuguaccuas(invAb) | 1508 | GUGGGAGACCCUGUGUACCUA | 1722 |
| AM19130-SS | (NAG37)s(invAb)sgugggagaCfCfCfuguguaucuas(invAb) | 1509 | GUGGGAGACCCUGUGUAUCUA | 1775 |
| AM19184-SS | (NAG37)s(invAb)saaugacaaGfAfCfaggauucugus(invAb) | 1510 | AAUGACAAGACAGGAUUCUGU | 1776 |
| AM19187-SS | (NAG37)s(invAb)saaugacaaGfaCfaGfgauucugas(invAb) | 1511 | AAUGACAAGACAGGAUUCUGA | 1703 |
| AM19188-SS | (NAG37)s(invAb)saacgacaaGfAfCfaggauucugas(invAb) | 1512 | AACGACAAGACAGGAUUCUGA | 1777 |
| AM19190-SS | (NAG37)s(invAb)sgaugacaaGfAfCfaggauucugas(invAb) | 1513 | GAUGACAAGACAGGAUUCUGA | 1778 |
| AM19192-SS | (NAG37)s(invAb)sgaugacaaGfaCfaGfgauucugus(invAb) | 1514 | GAUGACAAGACAGGAUUCUGU | 1779 |
| AM19194-SS | (NAG37)s(invAb)sgaugacaaGfAfCfaggauucugus(invAb) | 1515 | GAUGACAAGACAGGAUUCUGU | 1779 |
| AM19218-SS | (NAG37)s(invAb)sguccuggaAfUfAfuuagaugccus(invAb) | 1516 | GUCCUGGAAUAUUAGAUGCCU | 1780 |
| AM19220-SS | (NAG37)s(invAb)suguccuggAfAfUfauuagaugcus(invAb) | 1517 | UGUCCUGGAAUAUUAGAUGCU | 1781 |
| AM19222-SS | (NAG37)s(invAb)succuggaaUfAfUfuagaugccuus(invAb) | 1518 | UCCUGGAAUAUUAGAUGCCUU | 1782 |
| AM19404-SS | (NAG37)s(invAb)sguucucaaAfaAfuGfacaacacas(invAb) | 1519 | GUUCUCAAAAAUGACAACACA | 1735 |
| AM19409-SS | (NAG37)s(invAb)sugccauuuUfgUfcCfuuugauuas(invAb) | 1520 | UGCCAUUUUGUCCUUUGAUUA | 1732 |
| AM19537-SS | (NAG37)s(invAb)saacgacaaGfAfCfaggauucugus(invAb) | 1521 | AACGACAAGACAGGAUUCUGU | 1783 |
| AM19660-SS | (NAG37)s(invAb)scggugucuCfAfAfugcuucaauas(invAb) | 1522 | CGGUGUCUCAAUGCUUCAAUA | 1784 |
| AM19662-SS | (NAG37)s(invAb)scgaugucuCfAfAfugcuucaauas(invAb) | 1523 | CGAUGUCUCAAUGCUUCAAUA | 1785 |
| CS004445 | (NAG37)s(invAb)sgacgacaaGfAfCfaggauucugas(invAb) | 1524 | GACGACAAGACAGGAUUCUGA | 1786 |
| CS004448 | (NAG37)s(invAb)saggcuagaGfAfAfgaaaguuaaas(invAb) | 1525 | AGGCUAGAGAAGAAAGUUAAA | 1787 |
| CS004480 | (NAG37)s(invAb)sgaaugacaAfGfAfcaggauucuas(invAb) | 1526 | GAAUGACAAGACAGGAUUCUA | 1788 |
| CS004482 | (NAG37)s(invAb)sgugacaagAfCfAfggauucugaas(invAb) | 1527 | GUGACAAGACAGGAUUCUGAA | 1789 |
| CS005197 | (NAG37)sccuggaAfuAfUfUfAfgaugccuus(invAb) | 1528 | CCUGGAAUAUUAGAUGCCUU | 1790 |
| CS008428 | (NAG37)s(invAb)sgauuauggAfAfUfaggucuuucas(invAb) | 1534 | GAUUAUGGAAUAGGUCUUUCA | 1791 |
| CS913717 | (NAG37)s(invAb)sucagugcaGfCfCfuacacaaagas(invAb) | 1535 | UCAGUGCAGCCUACACAAAGA | 1711 |
| CS913729 | (NAG37)s(invAb)scgcuggaaAfCfAfcugaagaguus(invAb) | 1536 | CGCUGGAAACACUGAAGAGUU | 1717 |
| CS913739 | (NAG37)s(invAb)sgugggagaCfCfCfuguguaccuas(invAb) | 1537 | GUGGGAGACCCUGUGUACCUA | 1722 |
| CS914289 | (NAG37)s(invAb)sgauuauggAfAfUfaguucuuucas(invAb) | 1538 | GAUUAUGGAAUAGUUCUUUCA | 1734 |
| CS914989 | (NAG37)s(invAb)saacgacaaGfAfCfaggauucugas(invAb) | 1539 | AACGACAAGACAGGAUUCUGA | 1777 |
| CS914991 | (NAG37)s(invAb)sgaugacaaGfAfCfaggauucugas(invAb) | 1540 | GAUGACAAGACAGGAUUCUGA | 1778 |
| CS915323 | (NAG37)s(invAb)saacgacaaGfAfCfaggauucugus(invAb) | 1541 | AACGACAAGACAGGAUUCUGU | 1783 |

(A^{2N})=2-aminoadenosine nucleotide; I = hypoxanthine (inosine) nucleotide

[0155] The MARC1 RNAi agents described herein are formed by annealing an antisense strand with a sense strand. A sense strand containing a sequence listed in Table 2, Table 4, or Table 5 can be hybridized to any antisense strand containing a sequence listed in Table 2, or Table 3 provided the two sequences have a region of at least 85% complementarity over a contiguous 15, 16, 17, 18, 19, 20, or 21 nucleotide sequence.

[0156] In some embodiments, the antisense strand of a MARC1 RNAi agent disclosed herein differs by 0. 1. 2, or 3 nucleotides from any of the antisense strand sequences in Table 3. In some embodiments, the sense strand of a MARC1 RNAi agent disclosed herein differs by 0, 1, 2, or 3 nucleotides from any of the sense strand sequences in Table 4 or Table 5.

[0157] In some embodiments, a MARC1 RNAi agent antisense strand comprises a nucleotide sequence of any of the sequences in Table 2, or Table 3. In some embodiments, a MARC1 RNAi agent antisense strand comprises the sequence of nucleotides (from 5′ end->3′ end) 1-17, 2-17, 1-18, 2-18, 1-19, 2-19, 1-20, 2-20, 1-21, or 2-21, of any of the sequences in Table 2 or Table 3. In certain embodiments, a MARC1 RNAi agent antisense strand comprises or consists of a modified sequence of any one of the modified sequences in Table 3.

[0158] In some embodiments, a MARC1 RNAi agent sense strand comprises the nucleotide sequence of any of the sequences in Table 2, Table 4, or Table 5. In some embodiments, a MARC1 RNAi agent sense strand comprises the sequence of nucleotides (from 5′ end->3′ end) 1-17, 2-17, 3-17, 4-17, 1-18, 2-18, 3-18, 4-18, 1-19, 2-19, 3-19, 4-19, 1-20, 2-20, 3-20, 4-20, 1-21, 2-21, 3-21, or 4-21, of any of the sequences in Table 2, Table 4, or Table 5. In certain embodiments, a MARC1 RNAi agent sense strand comprises or consists of a modified sequence of any one of the modified sequences in Table 4 or Table 5.

[0159] For the MARC1 RNAi agents disclosed herein, the nucleotide at position 1 of the antisense strand (from 5′ end->3′ end) can be perfectly complementary to a MARC1 gene, or can be non-complementary to a MARC1 gene. In some embodiments, the nucleotide at position 1 of the antisense strand (from 5′ end->3′ end) is a U, A, or dT (or a modified version thereof). In some embodiments, the nucleotide at position 1 of the antisense strand (from 5′ end →3′ end) forms an A: U or U: A base pair with the sense strand.

[0160] A sense strand containing a sequence listed in Table 2, Table 4, or Table 5 can be hybridized to any antisense strand containing a sequence listed in Table 2, or Table 3 provided the two sequences have a region of at least 85% complementarity over a contiguous 15. 16, 17, 18, 19, 20, or 21 nucleotide sequence. In some embodiments, the MARC1 RNAi agent has a sense strand consisting of the modified sequence of any of the modified sequences in Table 4 or Table 5, and an antisense strand consisting of the modified sequence of any of the modified sequences in Table 3. Certain representative sequence pairings are exemplified by the Duplex ID Nos. shown in Tables 6A or 6B.

[0161] In some embodiments, a MARC1 RNAi agent comprises, consists of, or consists essentially of a duplex represented by any one of the Duplex ID Nos. presented herein. In some embodiments, a MARC1 RNAi agent comprises the sense strand and antisense strand nucleotide sequences of any of the duplexes represented by any of the Duplex ID Nos. presented herein. In some embodiments, a MARC1 RNAi agent comprises the sense strand and antisense strand nucleotide sequences of any of the duplexes represented by any of the Duplex ID Nos. presented herein and a targeting group and/or linking group wherein the targeting group and/or linking group is covalently linked (i.e., conjugated) to the sense strand or the antisense strand. In some embodiments, a MARC1 RNAi agent includes the sense strand and antisense strand modified nucleotide sequences of any of the Duplex ID Nos. presented herein. In some embodiments, a MARC1 RNAi agent comprises the sense strand and antisense strand modified nucleotide sequences of any of the Duplex ID Nos. presented herein and a targeting group and/or linking group, wherein the targeting group and/or linking group is covalently linked to the sense strand or the antisense strand.

[0162] In some embodiments, a MARC1 RNAi agent comprises an antisense strand and a sense strand having the nucleotide sequences of any of the antisense strand/sense strand duplexes of Table 2 or Tables 6A and 6B, and further comprises a targeting group or targeting ligand. In some embodiments, a MARC1 RNAi agent comprises an antisense strand and a sense strand having the nucleotide sequences of any of the antisense strand/sense strand duplexes of Table 2 or Tables 6A and 6B, and further comprises an asialoglycoprotein receptor ligand targeting group.

[0163] A targeting group. with or without a linker, can be linked to the 5′ or 3′ end of any of the sense and/or antisense strands disclosed in Tables 2, 3, 4, or 5. A linker, with or without a targeting group, can be attached to the 5′ or 3′ end of any of the sense and/or antisense strands disclosed in Tables 2, 3, 4, and 5.

[0164] In some embodiments, a MARC1 RNAi agent comprises an antisense strand and a sense strand having the nucleotide sequences of any of the antisense strand/sense strand duplexes of Table 2. Table 6A, or Table 6B, and further comprises a targeting ligand selected from the group consisting of: (NAG37) and (NAG37) s, each as defined in Table 7.

[0165] In some embodiments, a MARC1 RNAi agent comprises an antisense strand and a sense strand having the modified nucleotide sequence of any of the antisense strand and/or sense strand nucleotide sequences in Table 3 or Table 4.

[0166] In some embodiments, a MARC1 RNAi agent comprises an antisense strand and a sense strand having a modified nucleotide sequence of any of the antisense strand and/or sense strand nucleotide sequences of any of the duplexes Tables 6A and 6B, and further comprises an asialoglycoprotein receptor ligand targeting group.

[0167] In some embodiments, a MARC1 RNAi agent comprises, consists of, or consists essentially of any of the duplexes of Tables 6A and 6B.

TABLE 6A
MARC1 RNAi Agents Duplexes with Corresponding Sense and
Antisense Strand ID Numbers and Sequence ID numbers
for the modified and unmodified nucleotide sequences.

| | AS | AS | | SS | SS |
|---|---|---|---|---|---|
| | modified | unmodified | | modified | unmodified |
| | SEQ ID | SEQ ID | | SEQ ID | SEQ ID |
| AS ID | NO: | NO: | SS ID | NO: | NO: |
| AM16712-AS | 1056 | 1542 | AM16711-SS-NL | 1252 | 1667 |
| AM16714-AS | 1057 | 1543 | AM16713-SS-NL | 1253 | 1668 |
| AM16716-AS | 1058 | 1544 | AM16715-SS-NL | 1254 | 1669 |
| AM16718-AS | 1059 | 1545 | AM16717-SS-NL | 1255 | 1670 |
| AM16720-AS | 1060 | 1546 | AM16719-SS-NL | 1256 | 1671 |
| AM16722-AS | 1061 | 1547 | AM16721-SS-NL | 1257 | 1672 |
| AM16724-AS | 1062 | 1548 | AM16723-SS-NL | 1258 | 1673 |
| AM16726-AS | 1063 | 1549 | AM16725-SS-NL | 1259 | 1674 |
| AM16728-AS | 1064 | 1550 | AM16727-SS-NL | 1260 | 1675 |
| AM16730-AS | 1065 | 1551 | AM16729-SS-NL | 1261 | 1676 |
| AM16732-AS | 1066 | 1552 | AM16731-SS-NL | 1262 | 1677 |
| AM16734-AS | 1067 | 1553 | AM16733-SS-NL | 1263 | 1678 |
| AM16736-AS | 1068 | 1554 | AM16735-SS-NL | 1264 | 1679 |
| AM16738-AS | 1069 | 1555 | AM16737-SS-NL | 1265 | 1680 |
| AM16740-AS | 1070 | 1556 | AM16739-SS-NL | 1266 | 1681 |
| AM16742-AS | 1071 | 1557 | AM16741-SS-NL | 1267 | 1682 |
| AM16744-AS | 1072 | 1558 | AM16743-SS-NL | 1268 | 1683 |
| AM16746-AS | 1073 | 1559 | AM16745-SS-NL | 1269 | 1684 |
| AM16748-AS | 1074 | 1560 | AM16747-SS-NL | 1270 | 1685 |
| AM16750-AS | 1075 | 1561 | AM16749-SS-NL | 1271 | 1686 |
| AM16752-AS | 1076 | 1562 | AM16751-SS-NL | 1272 | 1687 |
| AM16754-AS | 1077 | 1563 | AM16753-SS-NL | 1273 | 1688 |
| AM16756-AS | 1078 | 1564 | AM16755-SS-NL | 1274 | 1689 |
| AM16758-AS | 1079 | 1565 | AM16757-SS-NL | 1275 | 1690 |
| AM16760-AS | 1080 | 1566 | AM16759-SS-NL | 1276 | 1691 |
| AM16762-AS | 1081 | 1567 | AM16761-SS-NL | 1277 | 1692 |
| AM16764-AS | 1082 | 1568 | AM16763-SS-NL | 1278 | 1693 |
| AM16766-AS | 1083 | 1569 | AM16765-SS-NL | 1279 | 1694 |
| AM16768-AS | 1084 | 1570 | AM16767-SS-NL | 1280 | 1695 |
| AM16770-AS | 1085 | 1571 | AM16769-SS-NL | 1281 | 1696 |
| AM16772-AS | 1086 | 1572 | AM16771-SS-NL | 1282 | 1697 |
| AM16774-AS | 1087 | 1573 | AM16773-SS-NL | 1283 | 1698 |
| AM17404-AS | 1088 | 1556 | AM16739-SS-NL | 1266 | 1681 |
| AM17405-AS | 1089 | 1556 | AM16739-SS-NL | 1266 | 1681 |
| AM17406-AS | 1090 | 1560 | AM16747-SS-NL | 1270 | 1685 |
| AM17407-AS | 1091 | 1560 | AM16747-SS-NL | 1270 | 1685 |
| AM17408-AS | 1092 | 1563 | AM16753-SS-NL | 1273 | 1688 |
| AM17409-AS | 1093 | 1563 | AM16753-SS-NL | 1273 | 1688 |
| AM17410-AS | 1094 | 1564 | AM16755-SS-NL | 1274 | 1689 |
| AM17411-AS | 1095 | 1564 | AM16755-SS-NL | 1274 | 1689 |
| AM17488-AS | 1096 | 1574 | AM17487-SS-NL | 1284 | 1699 |
| AM17490-AS | 1097 | 1575 | AM17489-SS-NL | 1285 | 1700 |
| AM17492-AS | 1098 | 1576 | AM17491-SS-NL | 1286 | 1701 |
| AM17494-AS | 1099 | 1577 | AM17493-SS-NL | 1287 | 1702 |
| AM17496-AS | 1100 | 1578 | AM17495-SS-NL | 1288 | 1703 |
| AM17498-AS | 1101 | 1579 | AM17497-SS-NL | 1289 | 1704 |
| AM17500-AS | 1102 | 1580 | AM17499-SS-NL | 1290 | 1705 |
| AM17502-AS | 1103 | 1581 | AM17501-SS-NL | 1291 | 1706 |
| AM17504-AS | 1104 | 1582 | AM17503-SS-NL | 1292 | 1707 |
| AM17498-AS | 1101 | 1579 | AM17505-SS-NL | 1293 | 1708 |
| AM17808-AS | 1105 | 1583 | AM17807-SS-NL | 1294 | 1709 |
| AM17810-AS | 1106 | 1584 | AM17809-SS-NL | 1295 | 1710 |
| AM17812-AS | 1107 | 1585 | AM17811-SS-NL | 1296 | 1711 |
| AM17814-AS | 1108 | 1586 | AM17813-SS-NL | 1297 | 1712 |
| AM17816-AS | 1109 | 1587 | AM17815-SS-NL | 1298 | 1713 |
| AM17818-AS | 1110 | 1588 | AM17817-SS-NL | 1299 | 1714 |
| AM17820-AS | 1111 | 1589 | AM17819-SS-NL | 1300 | 1715 |
| AM17822-AS | 1112 | 1590 | AM17821-SS-NL | 1301 | 1716 |
| AM17824-AS | 1113 | 1591 | AM17823-SS-NL | 1302 | 1717 |
| AM17826-AS | 1114 | 1592 | AM17825-SS-NL | 1303 | 1718 |
| AM17828-AS | 1115 | 1593 | AM17827-SS-NL | 1304 | 1719 |
| AM17830-AS | 1116 | 1594 | AM17829-SS-NL | 1305 | 1720 |
| AM17832-AS | 1117 | 1595 | AM17831-SS-NL | 1306 | 1721 |
| AM17834-AS | 1118 | 1596 | AM17833-SS-NL | 1307 | 1722 |
| AM17864-AS | 1119 | 1597 | AM17863-SS-NL | 1308 | 1723 |
| AM17866-AS | 1120 | 1598 | AM17865-SS-NL | 1309 | 1724 |
| AM17868-AS | 1121 | 1599 | AM17867-SS-NL | 1310 | 1725 |
| AM17870-AS | 1122 | 1600 | AM17869-SS-NL | 1311 | 1726 |
| AM17872-AS | 1123 | 1601 | AM17871-SS-NL | 1312 | 1727 |
| AM17874-AS | 1124 | 1602 | AM17873-SS-NL | 1313 | 1728 |
| AM17876-AS | 1125 | 1603 | AM17875-SS-NL | 1314 | 1729 |
| AM17878-AS | 1126 | 1604 | AM17877-SS-NL | 1315 | 1730 |
| AM17880-AS | 1127 | 1605 | AM17879-SS-NL | 1316 | 1731 |
| AM17882-AS | 1128 | 1606 | AM17881-SS-NL | 1317 | 1732 |
| AM18384-AS | 1129 | 1574 | AM17487-SS-NL | 1284 | 1699 |
| AM18385-AS | 1130 | 1574 | AM17487-SS-NL | 1284 | 1699 |
| AM18386-AS | 1131 | 1574 | AM17487-SS-NL | 1284 | 1699 |
| AM18387-AS | 1132 | 1574 | AM17487-SS-NL | 1284 | 1699 |
| AM18388-AS | 1133 | 1580 | AM17499-SS-NL | 1290 | 1705 |
| AM18389-AS | 1134 | 1580 | AM17499-SS-NL | 1290 | 1705 |
| AM18390-AS | 1135 | 1580 | AM17499-SS-NL | 1290 | 1705 |
| AM18391-AS | 1136 | 1580 | AM17499-SS-NL | 1290 | 1705 |
| AM18393-AS | 1137 | 1607 | AM18392-SS-NL | 1318 | 1733 |
| AM18394-AS | 1138 | 1607 | AM18392-SS-NL | 1318 | 1733 |
| AM18398-AS | 1139 | 1564 | AM16755-SS-NL | 1274 | 1689 |
| AM18399-AS | 1140 | 1564 | AM16755-SS-NL | 1274 | 1689 |
| AM18401-AS | 1141 | 1608 | AM18400-SS-NL | 1319 | 1734 |
| AM18402-AS | 1142 | 1608 | AM18400-SS-NL | 1319 | 1734 |
| AM18403-AS | 1143 | 1608 | AM18400-SS-NL | 1319 | 1734 |
| AM18404-AS | 1144 | 1556 | AM16739-SS-NL | 1266 | 1681 |
| AM18405-AS | 1145 | 1556 | AM16739-SS-NL | 1266 | 1681 |
| AM18407-AS | 1146 | 1609 | AM18406-SS-NL | 1320 | 1735 |
| AM18408-AS | 1147 | 1609 | AM18406-SS-NL | 1320 | 1735 |
| AM18409-AS | 1148 | 1609 | AM18406-SS-NL | 1320 | 1735 |
| AM18410-AS | 1149 | 1609 | AM18406-SS-NL | 1320 | 1735 |
| AM18411-AS | 1150 | 1609 | AM18406-SS-NL | 1320 | 1735 |
| AM18412-AS | 1151 | 1609 | AM18406-SS-NL | 1320 | 1735 |
| AM18413-AS | 1152 | 1609 | AM18406-SS-NL | 1320 | 1735 |
| AM18606-AS | 1153 | 1578 | AM17495-SS-NL | 1288 | 1703 |
| AM18607-AS | 1154 | 1578 | AM17495-SS-NL | 1288 | 1703 |
| AM18608-AS | 1155 | 1578 | AM17495-SS-NL | 1288 | 1703 |
| AM18609-AS | 1156 | 1578 | AM17495-SS-NL | 1288 | 1703 |
| AM18610-AS | 1157 | 1578 | AM17495-SS-NL | 1288 | 1703 |
| AM18611-AS | 1158 | 1582 | AM17503-SS-NL | 1292 | 1707 |
| AM18612-AS | 1159 | 1582 | AM17503-SS-NL | 1292 | 1707 |
| AM18614-AS | 1160 | 1610 | AM18613-SS-NL | 1321 | 1736 |
| AM18616-AS | 1161 | 1611 | AM18615-SS-NL | 1322 | 1737 |
| AM18629-AS | 1162 | 1564 | AM16755-SS-NL | 1274 | 1689 |
| AM18629-AS | 1162 | 1564 | AM18630-SS-NL | 1323 | 1689 |
| AM18629-AS | 1162 | 1564 | AM18631-SS-NL | 1324 | 1689 |
| AM18632-AS | 1163 | 1564 | AM16755-SS-NL | 1274 | 1689 |
| AM18632-AS | 1163 | 1564 | AM18630-SS-NL | 1323 | 1689 |
| AM18632-AS | 1163 | 1564 | AM18631-SS-NL | 1324 | 1689 |
| AM18634-AS | 1164 | 1612 | AM18633-SS-NL | 1325 | 1738 |
| AM18636-AS | 1165 | 1613 | AM18635-SS-NL | 1326 | 1739 |
| AM18638-AS | 1166 | 1614 | AM18637-SS-NL | 1327 | 1740 |
| AM18878-AS | 1167 | 1615 | AM18877-SS-NL | 1328 | 1741 |
| AM18880-AS | 1168 | 1616 | AM18879-SS-NL | 1329 | 1742 |
| AM18882-AS | 1169 | 1617 | AM18881-SS-NL | 1330 | 1743 |
| AM18884-AS | 1170 | 1618 | AM18883-SS-NL | 1331 | 1744 |
| AM18886-AS | 1171 | 1619 | AM18885-SS-NL | 1332 | 1745 |
| AM18888-AS | 1172 | 1620 | AM18887-SS-NL | 1333 | 1746 |
| AM18890-AS | 1173 | 1621 | AM18889-SS-NL | 1334 | 1747 |
| AM18892-AS | 1174 | 1622 | AM18891-SS-NL | 1335 | 1748 |
| AM18894-AS | 1175 | 1623 | AM18893-SS-NL | 1336 | 1749 |
| AM18896-AS | 1176 | 1624 | AM18895-SS-NL | 1337 | 1750 |
| AM18898-AS | 1177 | 1625 | AM18897-SS-NL | 1338 | 1751 |
| AM18900-AS | 1178 | 1626 | AM18899-SS-NL | 1339 | 1752 |
| AM18902-AS | 1179 | 1627 | AM18901-SS-NL | 1340 | 1753 |
| AM18904-AS | 1180 | 1628 | AM18903-SS-NL | 1341 | 1754 |
| AM18906-AS | 1181 | 1629 | AM18905-SS-NL | 1342 | 1755 |
| AM18908-AS | 1182 | 1630 | AM18907-SS-NL | 1343 | 1756 |
| AM18910-AS | 1183 | 1631 | AM18909-SS-NL | 1344 | 1757 |
| AM18912-AS | 1184 | 1632 | AM18911-SS-NL | 1345 | 1758 |
| AM18914-AS | 1185 | 1633 | AM18913-SS-NL | 1346 | 1759 |
| AM18916-AS | 1186 | 1634 | AM18915-SS-NL | 1347 | 1760 |
| AM18918-AS | 1187 | 1635 | AM18917-SS-NL | 1348 | 1761 |
| AM18920-AS | 1188 | 1636 | AM18919-SS-NL | 1349 | 1762 |
| AM18922-AS | 1189 | 1637 | AM18921-SS-NL | 1350 | 1763 |
| AM18924-AS | 1190 | 1638 | AM18923-SS-NL | 1351 | 1764 |
| AM18944-AS | 1191 | 1639 | AM18943-SS-NL | 1352 | 1765 |
| AM18946-AS | 1192 | 1640 | AM18945-SS-NL | 1353 | 1766 |
| AM18948-AS | 1193 | 1641 | AM18947-SS-NL | 1354 | 1767 |
| AM18950-AS | 1194 | 1642 | AM18949-SS-NL | 1355 | 1768 |
| AM18952-AS | 1195 | 1643 | AM18951-SS-NL | 1356 | 1769 |
| AM18954-AS | 1196 | 1644 | AM18953-SS-NL | 1357 | 1770 |
| AM18956-AS | 1197 | 1645 | AM18955-SS-NL | 1358 | 1771 |
| AM18958-AS | 1198 | 1646 | AM18957-SS-NL | 1359 | 1772 |
| AM18960-AS | 1199 | 1647 | AM18959-SS-NL | 1360 | 1773 |
| AM17500-AS | 1102 | 1580 | AM19119-SS-NL | 1361 | 1774 |
| AM19120-AS | 1200 | 1580 | AM19119-SS-NL | 1361 | 1774 |
| AM19121-AS | 1201 | 1580 | AM19119-SS-NL | 1361 | 1774 |
| AM19122-AS | 1202 | 1580 | AM19119-SS-NL | 1361 | 1774 |
| AM19123-AS | 1203 | 1580 | AM17499-SS-NL | 1290 | 1705 |
| AM19123-AS | 1203 | 1580 | AM19124-SS-NL | 1362 | 1705 |
| AM19121-AS | 1201 | 1580 | AM17499-SS-NL | 1290 | 1705 |
| AM19121-AS | 1201 | 1580 | AM19124-SS-NL | 1362 | 1705 |
| AM19125-AS | 1204 | 1596 | AM17833-SS-NL | 1307 | 1722 |
| AM19126-AS | 1205 | 1596 | AM17833-SS-NL | 1307 | 1722 |
| AM19127-AS | 1206 | 1596 | AM17833-SS-NL | 1307 | 1722 |
| AM19128-AS | 1207 | 1596 | AM17833-SS-NL | 1307 | 1722 |
| AM19127-AS | 1206 | 1596 | AM19129-SS-NL | 1363 | 1722 |
| AM19127-AS | 1206 | 1596 | AM19130-SS-NL | 1364 | 1775 |
| AM19131-AS | 1208 | 1648 | AM17833-SS-NL | 1307 | 1722 |
| AM19132-AS | 1209 | 1649 | AM17833-SS-NL | 1307 | 1722 |
| AM19181-AS | 1210 | 1578 | AM17495-SS-NL | 1288 | 1703 |
| AM19182-AS | 1211 | 1578 | AM17495-SS-NL | 1288 | 1703 |
| AM19183-AS | 1212 | 1578 | AM17495-SS-NL | 1288 | 1703 |
| AM19185-AS | 1213 | 1650 | AM19184-SS-NL | 1365 | 1776 |
| AM19186-AS | 1214 | 1650 | AM19184-SS-NL | 1365 | 1776 |
| AM18610-AS | 1157 | 1578 | AM19187-SS-NL | 1366 | 1703 |
| AM19189-AS | 1215 | 1651 | AM19188-SS-NL | 1367 | 1777 |
| AM19191-AS | 1216 | 1652 | AM19190-SS-NL | 1368 | 1778 |
| AM19193-AS | 1217 | 1653 | AM19192-SS-NL | 1369 | 1779 |
| AM19193-AS | 1217 | 1653 | AM19194-SS-NL | 1370 | 1779 |
| AM19219-AS | 1218 | 1654 | AM19218-SS-NL | 1371 | 1780 |
| AM19221-AS | 1219 | 1655 | AM19220-SS-NL | 1372 | 1781 |
| AM19223-AS | 1220 | 1656 | AM19222-SS-NL | 1373 | 1782 |
| AM18410-AS | 1149 | 1609 | AM19404-SS-NL | 1374 | 1735 |
| AM19405-AS | 1221 | 1609 | AM18406-SS-NL | 1320 | 1735 |
| AM19406-AS | 1222 | 1609 | AM18406-SS-NL | 1320 | 1735 |
| AM19407-AS | 1223 | 1606 | AM17881-SS-NL | 1317 | 1732 |
| AM19408-AS | 1224 | 1606 | AM17881-SS-NL | 1317 | 1732 |
| AM19408-AS | 1224 | 1606 | AM19409-SS-NL | 1375 | 1732 |
| AM19410-AS | 1225 | 1606 | AM17881-SS-NL | 1317 | 1732 |
| AM19411-AS | 1226 | 1606 | AM17881-SS-NL | 1317 | 1732 |
| AM19536-AS | 1227 | 1650 | AM19184-SS-NL | 1365 | 1776 |
| AM19538-AS | 1228 | 1657 | AM19537-SS-NL | 1376 | 1783 |
| AM19538.1-AS | 1229 | 1658 | AM19537-SS-NL | 1376 | 1783 |
| AM19539-AS | 1230 | 1653 | AM19194-SS-NL | 1370 | 1779 |
| AM19656-AS | 1231 | 1604 | AM17877-SS-NL | 1315 | 1730 |
| AM19657-AS | 1232 | 1604 | AM17877-SS-NL | 1315 | 1730 |
| AM19658-AS | 1233 | 1560 | AM16747-SS-NL | 1270 | 1685 |
| AM19659-AS | 1234 | 1560 | AM16747-SS-NL | 1270 | 1685 |
| AM19661-AS | 1235 | 1659 | AM19660-SS-NL | 1377 | 1784 |
| AM19663-AS | 1236 | 1660 | AM19662-SS-NL | 1378 | 1785 |
| CA004443 | 1237 | 1651 | CS914989-NL | 1394 | 1777 |
| CA004444 | 1238 | 1652 | CS914991-NL | 1395 | 1778 |
| CA004446 | 1239 | 1661 | CS004445-NL | 1379 | 1786 |
| CA004447 | 1240 | 1651 | CS914989-NL | 1394 | 1777 |
| CA004449 | 1241 | 1662 | CS004448-NL | 1380 | 1787 |
| CA004481 | 1242 | 1663 | CS004480-NL | 1381 | 1788 |
| CA004483 | 1243 | 1664 | CS004482-NL | 1382 | 1789 |
| CA004798 | 1244 | 1658 | CS915323-NL | 1396 | 1783 |
| CA005198 | 1245 | 1665 | CS005197-NL | 1383 | 1790 |
| CA008056 | 1246 | 1585 | CS913717-NL | 1390 | 1711 |
| CA008057 | 1247 | 1591 | CS913729-NL | 1391 | 1717 |
| CA008058 | 1248 | 1596 | CS913739-NL | 1392 | 1722 |
| CA008429 | 1249 | 1666 | CS008428-NL | 1389 | 1791 |
| CA008430 | 1250 | 1608 | CS914289-NL | 1393 | 1734 |

TABLE 6B
MARC1 RNAi Agents Duplexes with Corresponding Sense and Antisense Strand ID Numbers
and Sequence ID numbers for the modified and unmodified nucleotide sequences.

| | | AS | AS | | SS | SS |
|---|---|---|---|---|---|---|
| | | modified | unmodified | | modified | unmodified |
| | | SEQ ID | SEQ ID | | SEQ ID | SEQ ID |
| Duplex | AS ID | NO: | NO: | SS ID | NO: | NO: |
| AD11764 | AM16712-AS | 1056 | 1542 | AM16711-SS | 1397 | 1667 |
| AD11765 | AM16714-AS | 1057 | 1543 | AM16713-SS | 1398 | 1668 |
| AD11766 | AM16716-AS | 1058 | 1544 | AM16715-SS | 1399 | 1669 |
| AD11767 | AM16718-AS | 1059 | 1545 | AM16717-SS | 1400 | 1670 |
| AD11768 | AM16720-AS | 1060 | 1546 | AM16719-SS | 1401 | 1671 |
| AD11769 | AM16722-AS | 1061 | 1547 | AM16721-SS | 1402 | 1672 |
| AD11770 | AM16724-AS | 1062 | 1548 | AM16723-SS | 1403 | 1673 |
| AD11771 | AM16726-AS | 1063 | 1549 | AM16725-SS | 1404 | 1674 |
| AD11772 | AM16728-AS | 1064 | 1550 | AM16727-SS | 1405 | 1675 |
| AD11773 | AM16730-AS | 1065 | 1551 | AM16729-SS | 1406 | 1676 |
| AD11774 | AM16732-AS | 1066 | 1552 | AM16731-SS | 1407 | 1677 |
| AD11775 | AM16734-AS | 1067 | 1553 | AM16733-SS | 1408 | 1678 |
| AD11776 | AM16736-AS | 1068 | 1554 | AM16735-SS | 1409 | 1679 |
| AD11777 | AM16738-AS | 1069 | 1555 | AM16737-SS | 1410 | 1680 |
| AD11778 | AM16740-AS | 1070 | 1556 | AM16739-SS | 1411 | 1681 |
| AD11779 | AM16742-AS | 1071 | 1557 | AM16741-SS | 1412 | 1682 |
| AD11780 | AM16744-AS | 1072 | 1558 | AM16743-SS | 1413 | 1683 |
| AD11781 | AM16746-AS | 1073 | 1559 | AM16745-SS | 1414 | 1684 |
| AD11782 | AM16748-AS | 1074 | 1560 | AM16747-SS | 1415 | 1685 |
| AD11783 | AM16750-AS | 1075 | 1561 | AM16749-SS | 1416 | 1686 |
| AD11784 | AM16752-AS | 1076 | 1562 | AM16751-SS | 1417 | 1687 |
| AD11785 | AM16754-AS | 1077 | 1563 | AM16753-SS | 1418 | 1688 |
| AD11786 | AM16756-AS | 1078 | 1564 | AM16755-SS | 1419 | 1689 |
| AD11787 | AM16758-AS | 1079 | 1565 | AM16757-SS | 1420 | 1690 |
| AD11788 | AM16760-AS | 1080 | 1566 | AM16759-SS | 1421 | 1691 |
| AD11789 | AM16762-AS | 1081 | 1567 | AM16761-SS | 1422 | 1692 |
| AD11790 | AM16764-AS | 1082 | 1568 | AM16763-SS | 1423 | 1693 |
| AD11791 | AM16766-AS | 1083 | 1569 | AM16765-SS | 1424 | 1694 |
| AD11792 | AM16768-AS | 1084 | 1570 | AM16767-SS | 1425 | 1695 |
| AD11793 | AM16770-AS | 1085 | 1571 | AM16769-SS | 1426 | 1696 |
| AD11794 | AM16772-AS | 1086 | 1572 | AM16771-SS | 1427 | 1697 |
| AD11795 | AM16774-AS | 1087 | 1573 | AM16773-SS | 1428 | 1698 |
| AD12285 | AM17404-AS | 1088 | 1556 | AM16739-SS | 1411 | 1681 |
| AD12286 | AM17405-AS | 1089 | 1556 | AM16739-SS | 1411 | 1681 |
| AD12287 | AM17406-AS | 1090 | 1560 | AM16747-SS | 1415 | 1685 |
| AD12288 | AM17407-AS | 1091 | 1560 | AM16747-SS | 1415 | 1685 |
| AD12289 | AM17408-AS | 1092 | 1563 | AM16753-SS | 1418 | 1688 |
| AD12290 | AM17409-AS | 1093 | 1563 | AM16753-SS | 1418 | 1688 |
| AD12291 | AM17410-AS | 1094 | 1564 | AM16755-SS | 1419 | 1689 |
| AD12292 | AM17411-AS | 1095 | 1564 | AM16755-SS | 1419 | 1689 |
| AD12363 | AM17488-AS | 1096 | 1574 | AM17487-SS | 1429 | 1699 |
| AD12364 | AM17490-AS | 1097 | 1575 | AM17489-SS | 1430 | 1700 |
| AD12365 | AM17492-AS | 1098 | 1576 | AM17491-SS | 1431 | 1701 |
| AD12366 | AM17494-AS | 1099 | 1577 | AM17493-SS | 1432 | 1702 |
| AD12367 | AM17496-AS | 1100 | 1578 | AM17495-SS | 1433 | 1703 |
| AD12368 | AM17498-AS | 1101 | 1579 | AM17497-SS | 1434 | 1704 |
| AD12369 | AM17500-AS | 1102 | 1580 | AM17499-SS | 1435 | 1705 |
| AD12370 | AM17502-AS | 1103 | 1581 | AM17501-SS | 1436 | 1706 |
| AD12371 | AM17504-AS | 1104 | 1582 | AM17503-SS | 1437 | 1707 |
| AD12372 | AM17498-AS | 1101 | 1579 | AM17505-SS | 1438 | 1708 |
| AD12583 | AM17808-AS | 1105 | 1583 | AM17807-SS | 1439 | 1709 |
| AD12584 | AM17810-AS | 1106 | 1584 | AM17809-SS | 1440 | 1710 |
| AD12585 | AM17812-AS | 1107 | 1585 | AM17811-SS | 1441 | 1711 |
| AD12586 | AM17814-AS | 1108 | 1586 | AM17813-SS | 1442 | 1712 |
| AD12587 | AM17816-AS | 1109 | 1587 | AM17815-SS | 1443 | 1713 |
| AD12588 | AM17818-AS | 1110 | 1588 | AM17817-SS | 1444 | 1714 |
| AD12589 | AM17820-AS | 1111 | 1589 | AM17819-SS | 1445 | 1715 |
| AD12590 | AM17822-AS | 1112 | 1590 | AM17821-SS | 1446 | 1716 |
| AD12591 | AM17824-AS | 1113 | 1591 | AM17823-SS | 1447 | 1717 |
| AD12592 | AM17826-AS | 1114 | 1592 | AM17825-SS | 1448 | 1718 |
| AD12593 | AM17828-AS | 1115 | 1593 | AM17827-SS | 1449 | 1719 |
| AD12594 | AM17830-AS | 1116 | 1594 | AM17829-SS | 1450 | 1720 |
| AD12595 | AM17832-AS | 1117 | 1595 | AM17831-SS | 1451 | 1721 |
| AD12596 | AM17834-AS | 1118 | 1596 | AM17833-SS | 1452 | 1722 |
| AD12625 | AM17864-AS | 1119 | 1597 | AM17863-SS | 1453 | 1723 |
| AD12626 | AM17866-AS | 1120 | 1598 | AM17865-SS | 1454 | 1724 |
| AD12627 | AM17868-AS | 1121 | 1599 | AM17867-SS | 1455 | 1725 |
| AD12628 | AM17870-AS | 1122 | 1600 | AM17869-SS | 1456 | 1726 |
| AD12629 | AM17872-AS | 1123 | 1601 | AM17871-SS | 1457 | 1727 |
| AD12630 | AM17874-AS | 1124 | 1602 | AM17873-SS | 1458 | 1728 |
| AD12631 | AM17876-AS | 1125 | 1603 | AM17875-SS | 1459 | 1729 |
| AD12632 | AM17878-AS | 1126 | 1604 | AM17877-SS | 1460 | 1730 |
| AD12633 | AM17880-AS | 1127 | 1605 | AM17879-SS | 1461 | 1731 |
| AD12634 | AM17882-AS | 1128 | 1606 | AM17881-SS | 1462 | 1732 |
| AD12953 | AM18384-AS | 1129 | 1574 | AM17487-SS | 1429 | 1699 |
| AD12954 | AM18385-AS | 1130 | 1574 | AM17487-SS | 1429 | 1699 |
| AD12955 | AM18386-AS | 1131 | 1574 | AM17487-SS | 1429 | 1699 |
| AD12956 | AM18387-AS | 1132 | 1574 | AM17487-SS | 1429 | 1699 |
| AD12957 | AM18388-AS | 1133 | 1580 | AM17499-SS | 1435 | 1705 |
| AD12958 | AM18389-AS | 1134 | 1580 | AM17499-SS | 1435 | 1705 |
| AD12959 | AM18390-AS | 1135 | 1580 | AM17499-SS | 1435 | 1705 |
| AD12960 | AM18391-AS | 1136 | 1580 | AM17499-SS | 1435 | 1705 |
| AD12961 | AM18393-AS | 1137 | 1607 | AM18392-SS | 1463 | 1733 |
| AD12962 | AM18394-AS | 1138 | 1607 | AM18392-SS | 1463 | 1733 |
| AD12972 | AM18398-AS | 1139 | 1564 | AM16755-SS | 1419 | 1689 |
| AD12973 | AM18399-AS | 1140 | 1564 | AM16755-SS | 1419 | 1689 |
| AD12974 | AM18401-AS | 1141 | 1608 | AM18400-SS | 1464 | 1734 |
| AD12975 | AM18402-AS | 1142 | 1608 | AM18400-SS | 1464 | 1734 |
| AD12976 | AM18403-AS | 1143 | 1608 | AM18400-SS | 1464 | 1734 |
| AD12977 | AM18404-AS | 1144 | 1556 | AM16739-SS | 1411 | 1681 |
| AD12978 | AM18405-AS | 1145 | 1556 | AM16739-SS | 1411 | 1681 |
| AD12979 | AM18407-AS | 1146 | 1609 | AM18406-SS | 1465 | 1735 |
| AD12980 | AM18408-AS | 1147 | 1609 | AM18406-SS | 1465 | 1735 |
| AD12981 | AM18409-AS | 1148 | 1609 | AM18406-SS | 1465 | 1735 |
| AD12982 | AM18410-AS | 1149 | 1609 | AM18406-SS | 1465 | 1735 |
| AD12983 | AM18411-AS | 1150 | 1609 | AM18406-SS | 1465 | 1735 |
| AD12984 | AM18412-AS | 1151 | 1609 | AM18406-SS | 1465 | 1735 |
| AD12985 | AM18413-AS | 1152 | 1609 | AM18406-SS | 1465 | 1735 |
| AD13113 | AM18606-AS | 1153 | 1578 | AM17495-SS | 1433 | 1703 |
| AD13114 | AM18607-AS | 1154 | 1578 | AM17495-SS | 1433 | 1703 |
| AD13115 | AM18608-AS | 1155 | 1578 | AM17495-SS | 1433 | 1703 |
| AD13116 | AM18609-AS | 1156 | 1578 | AM17495-SS | 1433 | 1703 |
| AD13117 | AM18610-AS | 1157 | 1578 | AM17495-SS | 1433 | 1703 |
| AD13118 | AM18611-AS | 1158 | 1582 | AM17503-SS | 1437 | 1707 |
| AD13119 | AM18612-AS | 1159 | 1582 | AM17503-SS | 1437 | 1707 |
| AD13120 | AM18614-AS | 1160 | 1610 | AM18613-SS | 1466 | 1736 |
| AD13121 | AM18616-AS | 1161 | 1611 | AM18615-SS | 1467 | 1737 |
| AD13137 | AM18629-AS | 1162 | 1564 | AM16755-SS | 1419 | 1689 |
| AD13138 | AM18629-AS | 1162 | 1564 | AM18630-SS | 1468 | 1689 |
| AD13139 | AM18629-AS | 1162 | 1564 | AM18631-SS | 1469 | 1689 |
| AD13140 | AM18632-AS | 1163 | 1564 | AM16755-SS | 1419 | 1689 |
| AD13141 | AM18632-AS | 1163 | 1564 | AM18630-SS | 1468 | 1689 |
| AD13142 | AM18632-AS | 1163 | 1564 | AM18631-SS | 1469 | 1689 |
| AD13143 | AM18634-AS | 1164 | 1612 | AM18633-SS | 1470 | 1738 |
| AD13144 | AM18636-AS | 1165 | 1613 | AM18635-SS | 1471 | 1739 |
| AD13145 | AM18638-AS | 1166 | 1614 | AM18637-SS | 1472 | 1740 |
| AD13278 | AM18878-AS | 1167 | 1615 | AM18877-SS | 1473 | 1741 |
| AD13279 | AM18880-AS | 1168 | 1616 | AM18879-SS | 1474 | 1742 |
| AD13280 | AM18882-AS | 1169 | 1617 | AM18881-SS | 1475 | 1743 |
| AD13281 | AM18884-AS | 1170 | 1618 | AM18883-SS | 1476 | 1744 |
| AD13282 | AM18886-AS | 1171 | 1619 | AM18885-SS | 1477 | 1745 |
| AD13283 | AM18888-AS | 1172 | 1620 | AM18887-SS | 1478 | 1746 |
| AD13284 | AM18890-AS | 1173 | 1621 | AM18889-SS | 1479 | 1747 |
| AD13285 | AM18892-AS | 1174 | 1622 | AM18891-SS | 1480 | 1748 |
| AD13286 | AM18894-AS | 1175 | 1623 | AM18893-SS | 1481 | 1749 |
| AD13287 | AM18896-AS | 1176 | 1624 | AM18895-SS | 1482 | 1750 |
| AD13288 | AM18898-AS | 1177 | 1625 | AM18897-SS | 1483 | 1751 |
| AD13289 | AM18900-AS | 1178 | 1626 | AM18899-SS | 1484 | 1752 |
| AD13290 | AM18902-AS | 1179 | 1627 | AM18901-SS | 1485 | 1753 |
| AD13291 | AM18904-AS | 1180 | 1628 | AM18903-SS | 1486 | 1754 |
| AD13292 | AM18906-AS | 1181 | 1629 | AM18905-SS | 1487 | 1755 |
| AD13293 | AM18908-AS | 1182 | 1630 | AM18907-SS | 1488 | 1756 |
| AD13294 | AM18910-AS | 1183 | 1631 | AM18909-SS | 1489 | 1757 |
| AD13295 | AM18912-AS | 1184 | 1632 | AM18911-SS | 1490 | 1758 |
| AD13296 | AM18914-AS | 1185 | 1633 | AM18913-SS | 1491 | 1759 |
| AD13297 | AM18916-AS | 1186 | 1634 | AM18915-SS | 1492 | 1760 |
| AD13298 | AM18918-AS | 1187 | 1635 | AM18917-SS | 1493 | 1761 |
| AD13299 | AM18920-AS | 1188 | 1636 | AM18919-SS | 1494 | 1762 |
| AD13300 | AM18922-AS | 1189 | 1637 | AM18921-SS | 1495 | 1763 |
| AD13301 | AM18924-AS | 1190 | 1638 | AM18923-SS | 1496 | 1764 |
| AD13322 | AM18944-AS | 1191 | 1639 | AM18943-SS | 1497 | 1765 |
| AD13323 | AM18946-AS | 1192 | 1640 | AM18945-SS | 1498 | 1766 |
| AD13324 | AM18948-AS | 1193 | 1641 | AM18947-SS | 1499 | 1767 |
| AD13325 | AM18950-AS | 1194 | 1642 | AM18949-SS | 1500 | 1768 |
| AD13326 | AM18952-AS | 1195 | 1643 | AM18951-SS | 1501 | 1769 |
| AD13327 | AM18954-AS | 1196 | 1644 | AM18953-SS | 1502 | 1770 |
| AD13328 | AM18956-AS | 1197 | 1645 | AM18955-SS | 1503 | 1771 |
| AD13329 | AM18958-AS | 1198 | 1646 | AM18957-SS | 1504 | 1772 |
| AD13330 | AM18960-AS | 1199 | 1647 | AM18959-SS | 1505 | 1773 |
| AD13444 | AM17500-AS | 1102 | 1580 | AM19119-SS | 1506 | 1774 |
| AD13445 | AM19120-AS | 1200 | 1580 | AM19119-SS | 1506 | 1774 |
| AD13446 | AM19121-AS | 1201 | 1580 | AM19119-SS | 1506 | 1774 |
| AD13447 | AM19122-AS | 1202 | 1580 | AM19119-SS | 1506 | 1774 |
| AD13448 | AM19123-AS | 1203 | 1580 | AM17499-SS | 1435 | 1705 |
| AD13449 | AM19123-AS | 1203 | 1580 | AM19124-SS | 1507 | 1705 |
| AD13450 | AM19121-AS | 1201 | 1580 | AM17499-SS | 1435 | 1705 |
| AD13451 | AM19121-AS | 1201 | 1580 | AM19124-SS | 1507 | 1705 |
| AD13452 | AM19125-AS | 1204 | 1596 | AM17833-SS | 1452 | 1722 |
| AD13453 | AM19126-AS | 1205 | 1596 | AM17833-SS | 1452 | 1722 |
| AD13454 | AM19127-AS | 1206 | 1596 | AM17833-SS | 1452 | 1722 |
| AD13455 | AM19128-AS | 1207 | 1596 | AM17833-SS | 1452 | 1722 |
| AD13456 | AM19127-AS | 1206 | 1596 | AM19129-SS | 1508 | 1722 |
| AD13457 | AM19127-AS | 1206 | 1596 | AM19130-SS | 1509 | 1775 |
| AD13458 | AM19131-AS | 1208 | 1648 | AM17833-SS | 1452 | 1722 |
| AD13459 | AM19132-AS | 1209 | 1649 | AM17833-SS | 1452 | 1722 |
| AD13507 | AM19181-AS | 1210 | 1578 | AM17495-SS | 1433 | 1703 |
| AD13508 | AM19182-AS | 1211 | 1578 | AM17495-SS | 1433 | 1703 |
| AD13509 | AM19183-AS | 1212 | 1578 | AM17495-SS | 1433 | 1703 |
| AD13510 | AM19185-AS | 1213 | 1650 | AM19184-SS | 1510 | 1776 |
| AD13511 | AM19186-AS | 1214 | 1650 | AM19184-SS | 1510 | 1776 |
| AD13512 | AM18610-AS | 1157 | 1578 | AM19187-SS | 1511 | 1703 |
| AD13513 | AM19189-AS | 1215 | 1651 | AM19188-SS | 1512 | 1777 |
| AD13514 | AM19191-AS | 1216 | 1652 | AM19190-SS | 1513 | 1778 |
| AD13515 | AM19193-AS | 1217 | 1653 | AM19192-SS | 1514 | 1779 |
| AD13516 | AM19193-AS | 1217 | 1653 | AM19194-SS | 1515 | 1779 |
| AD13535 | AM19219-AS | 1218 | 1654 | AM19218-SS | 1516 | 1780 |
| AD13536 | AM19221-AS | 1219 | 1655 | AM19220-SS | 1517 | 1781 |
| AD13537 | AM19223-AS | 1220 | 1656 | AM19222-SS | 1518 | 1782 |
| AD13705 | AM18410-AS | 1149 | 1609 | AM19404-SS | 1519 | 1735 |
| AD13706 | AM19405-AS | 1221 | 1609 | AM18406-SS | 1465 | 1735 |
| AD13707 | AM19406-AS | 1222 | 1609 | AM18406-SS | 1465 | 1735 |
| AD13708 | AM19407-AS | 1223 | 1606 | AM17881-SS | 1462 | 1732 |
| AD13709 | AM19408-AS | 1224 | 1606 | AM17881-SS | 1462 | 1732 |
| AD13710 | AM19408-AS | 1224 | 1606 | AM19409-SS | 1520 | 1732 |
| AD13711 | AM19410-AS | 1225 | 1606 | AM17881-SS | 1462 | 1732 |
| AD13712 | AM19411-AS | 1226 | 1606 | AM17881-SS | 1462 | 1732 |
| AD13804 | AM19536-AS | 1227 | 1650 | AM19184-SS | 1510 | 1776 |
| AD13805 | AM19538-AS | 1228 | 1657 | AM19537-SS | 1521 | 1783 |
| AD13805.1 | AM19538.1-AS | 1229 | 1658 | AM19537-SS | 1521 | 1783 |
| AD13806 | AM19539-AS | 1230 | 1653 | AM19194-SS | 1515 | 1779 |
| AD13921 | AM19656-AS | 1231 | 1604 | AM17877-SS | 1460 | 1730 |
| AD13922 | AM19657-AS | 1232 | 1604 | AM17877-SS | 1460 | 1730 |
| AD13923 | AM19658-AS | 1233 | 1560 | AM16747-SS | 1415 | 1685 |
| AD13924 | AM19659-AS | 1234 | 1560 | AM16747-SS | 1415 | 1685 |
| AD13925 | AM19661-AS | 1235 | 1659 | AM19660-SS | 1522 | 1784 |
| AD13926 | AM19663-AS | 1236 | 1660 | AM19662-SS | 1523 | 1785 |
| AC003589 | CA004443 | 1237 | 1651 | CS914989 | 1539 | 1777 |
| AC003590 | CA004444 | 1238 | 1652 | CS914991 | 1540 | 1778 |
| AC003591 | CA004446 | 1239 | 1661 | CS004445 | 1524 | 1786 |
| AC003592 | CA004447 | 1240 | 1651 | CS914989 | 1539 | 1777 |
| AC003593 | CA004449 | 1241 | 1662 | CS004448 | 1525 | 1787 |
| AC003625 | CA004481 | 1242 | 1663 | CS004480 | 1526 | 1788 |
| AC003626 | CA004483 | 1243 | 1664 | CS004482 | 1527 | 1789 |
| AC003891 | CA004798 | 1244 | 1658 | CS915323 | 1541 | 1783 |
| AC004186 | CA005198 | 1245 | 1665 | CS005197 | 1528 | 1790 |
| AC006749 | CA008056 | 1246 | 1585 | CS913717 | 1535 | 1711 |
| AC006750 | CA008057 | 1247 | 1591 | CS913729 | 1536 | 1717 |
| AC006751 | CA008058 | 1248 | 1596 | CS913739 | 1537 | 1722 |
| AC007084 | CA008429 | 1249 | 1666 | CS008428 | 1534 | 1791 |
| AC007085 | CA008430 | 1250 | 1608 | CS914289 | 1538 | 1734 |

TABLE 6C
MARC1 RNAi Agents Duplexes with Corresponding Sense
and Antisense Strand ID Numbers Referencing Position
Targeted on MARC1 Gene (SEQ ID NO: 1)

| | | | Targeted MARC1 |
|---|---|---|---|
| | Antisense | Sense | Gene Position |
| Duplex ID | Strand ID | Strand ID | (Of SEQ ID NO: 1) |
| AD11764 | AM16712-AS | AM16711-SS | 325 |
| AD11765 | AM16714-AS | AM16713-SS | 536 |
| AD11766 | AM16716-AS | AM16715-SS | 609 |
| AD11767 | AM16718-AS | AM16717-SS | 611 |
| AD11768 | AM16720-AS | AM16719-SS | 636 |
| AD11769 | AM16722-AS | AM16721-SS | 640 |
| AD11770 | AM16724-AS | AM16723-SS | 644 |
| AD11771 | AM16726-AS | AM16725-SS | 710 |
| AD11772 | AM16728-AS | AM16727-SS | 841 |
| AD11773 | AM16730-AS | AM16729-SS | 932 |
| AD11774 | AM16732-AS | AM16731-SS | 940 |
| AD11775 | AM16734-AS | AM16733-SS | 945 |
| AD11776 | AM16736-AS | AM16735-SS | 954 |
| AD11777 | AM16738-AS | AM16737-SS | 1057 |
| AD11778 | AM16740-AS | AM16739-SS | 1089 |
| AD11779 | AM16742-AS | AM16741-SS | 1098 |
| AD11780 | AM16744-AS | AM16743-SS | 1102 |
| AD11781 | AM16746-AS | AM16745-SS | 1111 |
| AD11782 | AM16748-AS | AM16747-SS | 1190 |
| AD11783 | AM16750-AS | AM16749-SS | 1193 |
| AD11784 | AM16752-AS | AM16751-SS | 1282 |
| AD11785 | AM16754-AS | AM16753-SS | 1310 |
| AD11786 | AM16756-AS | AM16755-SS | 1313 |
| AD11787 | AM16758-AS | AM16757-SS | 1605 |
| AD11788 | AM16760-AS | AM16759-SS | 1635 |
| AD11789 | AM16762-AS | AM16761-SS | 1646 |
| AD11790 | AM16764-AS | AM16763-SS | 1648 |
| AD11791 | AM16766-AS | AM16765-SS | 1852 |
| AD11792 | AM16768-AS | AM16767-SS | 1897 |
| AD11793 | AM16770-AS | AM16769-SS | 1898 |
| AD11794 | AM16772-AS | AM16771-SS | 1955 |
| AD11795 | AM16774-AS | AM16773-SS | 1990 |
| AD12285 | AM17404-AS | AM16739-SS | 1089 |
| AD12286 | AM17405-AS | AM16739-SS | 1089 |
| AD12287 | AM17406-AS | AM16747-SS | 1190 |
| AD12288 | AM17407-AS | AM16747-SS | 1190 |
| AD12289 | AM17408-AS | AM16753-SS | 1310 |
| AD12290 | AM17409-AS | AM16753-SS | 1310 |
| AD12291 | AM17410-AS | AM16755-SS | 1313 |
| AD12292 | AM17411-AS | AM16755-SS | 1313 |
| AD12363 | AM17488-AS | AM17487-SS | 305 |
| AD12364 | AM17490-AS | AM17489-SS | 761 |
| AD12365 | AM17492-AS | AM17491-SS | 956 |
| AD12366 | AM17494-AS | AM17493-SS | 1109 |
| AD12367 | AM17496-AS | AM17495-SS | 1275 |
| AD12368 | AM17498-AS | AM17497-SS | 1633 |
| AD12369 | AM17500-AS | AM17499-SS | 1817 |
| AD12370 | AM17502-AS | AM17501-SS | 1900 |
| AD12371 | AM17504-AS | AM17503-SS | 1954 |
| AD12372 | AM17498-AS | AM17505-SS | 1633 |
| AD12583 | AM17808-AS | AM17807-SS | 405 |
| AD12584 | AM17810-AS | AM17809-SS | 406 |
| AD12585 | AM17812-AS | AM17811-SS | 409 |
| AD12586 | AM17814-AS | AM17813-SS | 411 |
| AD12587 | AM17816-AS | AM17815-SS | 564 |
| AD12588 | AM17818-AS | AM17817-SS | 565 |
| AD12589 | AM17820-AS | AM17819-SS | 566 |
| AD12590 | AM17822-AS | AM17821-SS | 567 |
| AD12591 | AM17824-AS | AM17823-SS | 901 |
| AD12592 | AM17826-AS | AM17825-SS | 1008 |
| AD12593 | AM17828-AS | AM17827-SS | 1009 |
| AD12594 | AM17830-AS | AM17829-SS | 1012 |
| AD12595 | AM17832-AS | AM17831-SS | 1013 |
| AD12596 | AM17834-AS | AM17833-SS | 1014 |
| AD12625 | AM17864-AS | AM17863-SS | 610 |
| AD12626 | AM17866-AS | AM17865-SS | 714 |
| AD12627 | AM17868-AS | AM17867-SS | 716 |
| AD12628 | AM17870-AS | AM17869-SS | 744 |
| AD12629 | AM17872-AS | AM17871-SS | 933 |
| AD12630 | AM17874-AS | AM17873-SS | 938 |
| AD12631 | AM17876-AS | AM17875-SS | 1302 |
| AD12632 | AM17878-AS | AM17877-SS | 1642 |
| AD12633 | AM17880-AS | AM17879-SS | 1927 |
| AD12634 | AM17882-AS | AM17881-SS | 1931 |
| AD12953 | AM18384-AS | AM17487-SS | 305 |
| AD12954 | AM18385-AS | AM17487-SS | 305 |
| AD12955 | AM18386-AS | AM17487-SS | 305 |
| AD12956 | AM18387-AS | AM17487-SS | 305 |
| AD12957 | AM18388-AS | AM17499-SS | 1817 |
| AD12958 | AM18389-AS | AM17499-SS | 1817 |
| AD12959 | AM18390-AS | AM17499-SS | 1817 |
| AD12960 | AM18391-AS | AM17499-SS | 1817 |
| AD12961 | AM18393-AS | AM18392-SS | 1817 |
| AD12962 | AM18394-AS | AM18392-SS | 1817 |
| AD12972 | AM18398-AS | AM16755-SS | 1313 |
| AD12973 | AM18399-AS | AM16755-SS | 1313 |
| AD12974 | AM18401-AS | AM18400-SS | 1313 |
| AD12975 | AM18402-AS | AM18400-SS | 1313 |
| AD12976 | AM18403-AS | AM18400-SS | 1313 |
| AD12977 | AM18404-AS | AM16739-SS | 1089 |
| AD12978 | AM18405-AS | AM16739-SS | 1089 |
| AD12979 | AM18407-AS | AM18406-SS | 1089 |
| AD12980 | AM18408-AS | AM18406-SS | 1089 |
| AD12981 | AM18409-AS | AM18406-SS | 1089 |
| AD12982 | AM18410-AS | AM18406-SS | 1089 |
| AD12983 | AM18411-AS | AM18406-SS | 1089 |
| AD12984 | AM18412-AS | AM18406-SS | 1089 |
| AD12985 | AM18413-AS | AM18406-SS | 1089 |
| AD13113 | AM18606-AS | AM17495-SS | 1275 |
| AD13114 | AM18607-AS | AM17495-SS | 1275 |
| AD13115 | AM18608-AS | AM17495-SS | 1275 |
| AD13116 | AM18609-AS | AM17495-SS | 1275 |
| AD13117 | AM18610-AS | AM17495-SS | 1275 |
| AD13118 | AM18611-AS | AM17503-SS | 1954 |
| AD13119 | AM18612-AS | AM17503-SS | 1954 |
| AD13120 | AM18614-AS | AM18613-SS | 306 |
| AD13121 | AM18616-AS | AM18615-SS | 307 |
| AD13137 | AM18629-AS | AM16755-SS | 1313 |
| AD13138 | AM18629-AS | AM18630-SS | 1313 |
| AD13139 | AM18629-AS | AM18631-SS | 1313 |
| AD13140 | AM18632-AS | AM16755-SS | 1313 |
| AD13141 | AM18632-AS | AM18630-SS | 1313 |
| AD13142 | AM18632-AS | AM18631-SS | 1313 |
| AD13143 | AM18634-AS | AM18633-SS | 1314 |
| AD13144 | AM18636-AS | AM18635-SS | 1314 |
| AD13145 | AM18638-AS | AM18637-SS | 1314 |
| AD13278 | AM18878-AS | AM18877-SS | 2014 |
| AD13279 | AM18880-AS | AM18879-SS | 2018 |
| AD13280 | AM18882-AS | AM18881-SS | 2020 |
| AD13281 | AM18884-AS | AM18883-SS | 2630 |
| AD13282 | AM18886-AS | AM18885-SS | 2779 |
| AD13283 | AM18888-AS | AM18887-SS | 3190 |
| AD13284 | AM18890-AS | AM18889-SS | 3332 |
| AD13285 | AM18892-AS | AM18891-SS | 3412 |
| AD13286 | AM18894-AS | AM18893-SS | 3464 |
| AD13287 | AM18896-AS | AM18895-SS | 3991 |
| AD13288 | AM18898-AS | AM18897-SS | 4500 |
| AD13289 | AM18900-AS | AM18899-SS | 4582 |
| AD13290 | AM18902-AS | AM18901-SS | 4585 |
| AD13291 | AM18904-AS | AM18903-SS | 4623 |
| AD13292 | AM18906-AS | AM18905-SS | 4639 |
| AD13293 | AM18908-AS | AM18907-SS | 5255 |
| AD13294 | AM18910-AS | AM18909-SS | 5849 |
| AD13295 | AM18912-AS | AM18911-SS | 6143 |
| AD13296 | AM18914-AS | AM18913-SS | 6294 |
| AD13297 | AM18916-AS | AM18915-SS | 6408 |
| AD13298 | AM18918-AS | AM18917-SS | 6537 |
| AD13299 | AM18920-AS | AM18919-SS | 6833 |
| AD13300 | AM18922-AS | AM18921-SS | 6957 |
| AD13301 | AM18924-AS | AM18923-SS | 7208 |
| AD13322 | AM18944-AS | AM18943-SS | 419 |
| AD13323 | AM18946-AS | AM18945-SS | 601 |
| AD13324 | AM18948-AS | AM18947-SS | 1124 |
| AD13325 | AM18950-AS | AM18949-SS | 1131 |
| AD13326 | AM18952-AS | AM18951-SS | 1157 |
| AD13327 | AM18954-AS | AM18953-SS | 1246 |
| AD13328 | AM18956-AS | AM18955-SS | 1332 |
| AD13329 | AM18958-AS | AM18957-SS | 1432 |
| AD13330 | AM18960-AS | AM18959-SS | 1842 |
| AD13444 | AM17500-AS | AM19119-SS | 1817 |
| AD13445 | AM19120-AS | AM19119-SS | 1817 |
| AD13446 | AM19121-AS | AM19119-SS | 1817 |
| AD13447 | AM19122-AS | AM19119-SS | 1817 |
| AD13448 | AM19123-AS | AM17499-SS | 1817 |
| AD13449 | AM19123-AS | AM19124-SS | 1817 |
| AD13450 | AM19121-AS | AM17499-SS | 1817 |
| AD13451 | AM19121-AS | AM19124-SS | 1817 |
| AD13452 | AM19125-AS | AM17833-SS | 1014 |
| AD13453 | AM19126-AS | AM17833-SS | 1014 |
| AD13454 | AM19127-AS | AM17833-SS | 1014 |
| AD13455 | AM19128-AS | AM17833-SS | 1014 |
| AD13456 | AM19127-AS | AM19129-SS | 1014 |
| AD13457 | AM19127-AS | AM19130-SS | 1014 |
| AD13458 | AM19131-AS | AM17833-SS | 1014 |
| AD13459 | AM19132-AS | AM17833-SS | 1014 |
| AD13507 | AM19181-AS | AM17495-SS | 1275 |
| AD13508 | AM19182-AS | AM17495-SS | 1275 |
| AD13509 | AM19183-AS | AM17495-SS | 1275 |
| AD13510 | AM19185-AS | AM19184-SS | 1275 |
| AD13511 | AM19186-AS | AM19184-SS | 1275 |
| AD13512 | AM18610-AS | AM19187-SS | 1275 |
| AD13513 | AM19189-AS | AM19188-SS | 1275 |
| AD13514 | AM19191-AS | AM19190-SS | 1275 |
| AD13515 | AM19193-AS | AM19192-SS | 1275 |
| AD13516 | AM19193-AS | AM19194-SS | 1275 |
| AD13535 | AM19219-AS | AM19218-SS | 1059 |
| AD13536 | AM19221-AS | AM19220-SS | 1058 |
| AD13537 | AM19223-AS | AM19222-SS | 1060 |
| AD13705 | AM18410-AS | AM19404-SS | 1089 |
| AD13706 | AM19405-AS | AM18406-SS | 1089 |
| AD13707 | AM19406-AS | AM18406-SS | 1089 |
| AD13708 | AM19407-AS | AM17881-SS | 1931 |
| AD13709 | AM19408-AS | AM17881-SS | 1931 |
| AD13710 | AM19408-AS | AM19409-SS | 1931 |
| AD13711 | AM19410-AS | AM17881-SS | 1931 |
| AD13712 | AM19411-AS | AM17881-SS | 1931 |
| AD13804 | AM19536-AS | AM19184-SS | 1275 |
| AD13805 | AM19538-AS | AM19537-SS | 1275 |
| AD13805.1 | AM19538.1-AS | AM19537-SS | 1275 |
| AD13806 | AM19539-AS | AM19194-SS | 1275 |
| AD13921 | AM19656-AS | AM17877-SS | 1642 |
| AD13922 | AM19657-AS | AM17877-SS | 1642 |
| AD13923 | AM19658-AS | AM16747-SS | 1190 |
| AD13924 | AM19659-AS | AM16747-SS | 1190 |
| AD13925 | AM19661-AS | AM19660-SS | 1190 |
| AD13926 | AM19663-AS | AM19662-SS | 1190 |
| AC003589 | CA004443 | CS914989 | 1275 |
| AC003590 | CA004444 | CS914991 | 1275 |
| AC003591 | CA004446 | CS004445 | 1275 |
| AC003592 | CA004447 | CS914989 | 1275 |
| AC003593 | CA004449 | CS004448 | 711 |
| AC003625 | CA004481 | CS004480 | 1274 |
| AC003626 | CA004483 | CS004482 | 1276 |
| AC003891 | CA004798 | CS915323 | 1275 |
| AC004186 | CA005198 | CS005197 | 1059 |
| AC006749 | CA008056 | CS913717 | 409 |
| AC006750 | CA008057 | CS913729 | 901 |
| AC006751 | CA008058 | CS913739 | 1014 |
| AC007084 | CA008429 | CS008428 | 1313 |
| AC007085 | CA008430 | CS914289 | 1313 |

TABLE 6D
MARC1 RNAi Agent Duplexes Showing Chemically Modified Antisense Strand and Sense Strand Sequences

| Duplex ID: | Modified Antisense Strand (5′→3′) | SEQ ID NO. | Modified Sense Strand (5′→3′) | SEQ ID NO. |
|---|---|---|---|---|
| AD11764 | usAfsasCfcAfuguuuCfcCfuCfcUfggsu | 1056 | (NAG37)s(invAb)saccaggagGfGfAfaacaugguuas(invAb) | 1397 |
| AD11765 | usAfscsUfuCfaggaaGfcUfgGfuUfausc | 1057 | (NAG37)s(invAb)sgauaaccaGfCfUfuccugaaguas(invAb) | 1398 |
| AD11766 | usAfsasCfaAfgucugCfuAfuUfuGfausg | 1058 | (NAG37)s(invAb)scaucaaauAfGfCfagacuuguuas(invAb) | 1399 |
| AD11767 | usGfsgsAfaCfaagucUfgCfuAfuUfugsg | 1059 | (NAG37)s(invAb)sccaaauagCfAfGfacuuiuuccas(invAb) | 1400 |
| AD11768 | usGfsasGfuAfagcaaUfcUfgGfuCfcusc | 1060 | (NAG37)s(invAb)sgaggaccaGfAfUfugcuuacucas(invAb) | 1401 |
| AD11769 | usGfsusCfuGfaguaaGfcAfaUfcUfggsu | 1061 | (NAG37)s(invAb)saccagauuGfCfUfuacucagacas(invAb) | 1402 |
| AD11770 | usUfsgsGfuGfU_{UNA}cugaGfuAfaGfcAfausc | 1062 | (NAG37)s(invAb)sgauugcuuAfCfUfcagacaccaas(invAb) | 1403 |
| AD11771 | usUfsasAfcUfuucuuCfuCfuAfgCfcusg | 1063 | (NAG37)s(invAb)scaggcuagAfGfAfagaaaguuaas(invAb) | 1404 |
| AD11772 | usGfsgsUfuAfaaaugCfaUfcUfgGfaasc | 1064 | (NAG37)s(invAb)sguuccagaUfGfCfauuuuaaccas(invAb) | 1405 |
| AD11773 | asAfscsUfuUfcguucUfgAfaGfgGfucsa | 1065 | (NAG37)s(invAb)sugacccuuCfAfGfaacgaaaguus(invAb) | 1406 |
| AD11774 | usUfscsCfaUfauaacUfuUfcGfuUfcusg | 1066 | (NAG37)s(invAb)scagaacgaAfAfGfuuauauggaas(invAb) | 1407 |
| AD11775 | usGfsasUfuUfuccauAfuAfaCfuUfucsg | 1067 | (NAG37)s(invAb)scgaaaguuAfUfAfuggaaaaucas(invAb) | 1408 |
| AD11776 | asAfsasGfaGfuggugAfuUfuUfcCfausg | 1068 | (NAG37)s(invAb)scauggaaaAfUfCfaccacucuuus(invAb) | 1409 |
| AD11777 | usCfsasUfcUfaauauUfcCfaGfgAfcasc | 1069 | (NAG37)s(invAb)sguguccugGfAfAfuauuagaugas(invAb) | 1410 |
| AD11778 | asGfsusGfuUfgucauUfuUfuGfaGfaasc | 1070 | (NAG37)s(invAb)sguucucaaAfAfAfugacaacacus(invAb) | 1411 |
| AD11779 | usAfsusGfcUfucaagUfgUfuGfuCfausc | 1071 | (NAG37)s(invAb)sgaugacaaCfAfCfuugaagcauas(invAb) | 1412 |
| AD11780 | asCfsasCfcAfU_{UNA}gcuuCfaAfgUfgUfugsc | 1072 | (NAG37)s(invAb)sgcaacacuUfGfAfagcauggugus(invAb) | 1413 |
| AD11781 | asGfsusUfcUfgaaacAfcCfaUfgCfuusc | 1073 | (NAG37)s(invAb)sgaagcaugGfUfGfuuucagaacus(invAb) | 1414 |
| AD11782 | usAfsusUfgAfagcauUfgAfgAfcAfccsa | 1074 | (NAG37)s(invAb)suggugucuCfAfAfugcuucaauas(invAb) | 1415 |
| AD11783 | usGfsasCfaUfugaagCfaUfuGfaGfacsg | 1075 | (NAG37)s(invAb)scgucucaaUfGfCfuucaaugucas(invAb) | 1416 |
| AD11784 | usGfsasGfuUfuucagAfaUfcCfuGfucsc | 1076 | (NAG37)s(invAb)sggacaggaUfUfCfugaaaacucas(invAb) | 1417 |
| AD11785 | asAfsgsAfaCfuauucCfaUfaAfuCfagsc | 1077 | (NAG37)s(invAb)sgcugauuaUfGfGfaauaguucuus(invAb) | 1418 |
| AD11786 | asGfsasAfaGfaacuaUfuCfcAfuAfausc | 1078 | (NAG37)s(invAb)sgauuauggAfAfUfaguucuuucus(invAb) | 1419 |
| AD11787 | asGfsasUfcCfagaucUfaUfgGfaAfaasc | 1079 | (NAG37)s(invAb)sguuuuccaUfAfGfaucuigaucus(invAb) | 1420 |
| AD11788 | asUfscsCfaAfugcugUfcUfgAfgAfagsc | 1080 | (NAG37)s(invAb)sgcuucucaGfAfCfagcauuggaus(invAb) | 1421 |
| AD11789 | asCfscsUfuUfaggaaAfuCfcAfaUfgcsc | 1081 | NAG37)s(invAb)sggcauuggAfUfUfuccuaaaggus(invAb) | 1422 |
| AD11790 | usCfsasCfcUfuuaggAfaAfuCfcAfausg | 1082 | (NAG37)s(invAb)scauuggauUfUfCfcuaaagguias(invAb) | 1423 |
| AD11791 | usGfsgsUfuUfuaaacAfaCfuGfaCfausg | 1083 | (NAG37)s(invAb)scaugucagUfUfGfuuuaaaaccas(invAb) | 1424 |
| AD11792 | usUfscsAfuCfagaucUfuAfgAfgUfuasc | 1084 | (NAG37)s(invAb)sguaacucuAfAfGfaucugaugaas(invAb) | 1425 |
| AD11793 | usUfsusCfaUfcagauCfuUfaGfaGfuusg | 1085 | (NAG37)s(invAb)scaacucuaAfGfAfucugaugaaas(invAb) | 1426 |
| AD11794 | usCfsasAfgUfuuaguCfaAfcUfuCfccsa | 1086 | (NAG37)s(invAb)sugggaaguUfGfAfcuaaacuugas(invAb) | 1427 |
| AD11795 | usAfsgsCfuUfccauuUfaUfuCfaCfagsc | 1087 | (NAG37)s(invAb)sgcugugaaUfAfAfauggaagcuas(invAb) | 1428 |
| AD12285 | asGfsusguugucauUfuUfuGfagaasc | 1088 | (NAG37)s(invAb)sguucucaaAfAfAfugacaacacus(invAb) | 1411 |
| AD12286 | cPrpasGfsusguugucauUfuUfuGfagaasc | 1089 | (NAG37)s(invAb)sguucucaaAfAfAfugacaacacus(invAb) | 1411 |
| AD12287 | usAfsusugaagcauUfgAfgAfcaccsa | 1090 | (NAG37)s(invAb)suggugucuCfAfAfugcuucaauas(invAb) | 1415 |
| AD12288 | cPrpusAfsusugaagcauUfgAfgAfcaccsa | 1091 | (NAG37)s(invAb)suggugucuCfAfAfugcuucaauas(invAb) | 1415 |
| AD12289 | asAfsgsaacuauucCfaUfaAfucagsc | 1092 | (NAG37)s(invAb)sgcugauuaUfGfGfaauaguucuus(invAb) | 1418 |
| AD12290 | cPrpasAfsgsaacuauucCfaUfaAfucagsc | 1093 | (NAG37)s(invAb)sgcugauuaUfGfGfaauaguucuus(invAb) | 1418 |
| AD12291 | asGfsasaagaacuaUfuCfcAfuaausc | 1094 | (NAG37)s(invAb)sgauuauggAfAfUfaguucuuucus(invAb) | 1419 |
| AD12292 | cPrpasGfsasaagaacuaUfuCfcAfuaausc | 1095 | (NAG37)s(invAb)sgauuauggAfAfUfaguucuuucus(invAb) | 1419 |
| AD12363 | usUfsgsAfuCfacaagCfcAfaAfaCfcusg | 1096 | (NAG37)s(invAb)scagguuuuGfGfCfuugugaucaas(invAb) | 1429 |
| AD12364 | usCfsasUfaGfacaucGfcAfuCfcUfgasa | 1097 | (NAG37)s(invAb)suucaggauGfCfGfaugucuaugas(invAb) | 1430 |
| AD12365 | usCfsasAfaGfaguggUfgAfuUfuUfccsa | 1098 | (NAG37)s(invAb)suggaaaauCfAfCfcacucuuugas(invAb) | 1431 |
| AD12366 | usUfscsUfgAfaacacCfaUfgCfuUfcasa | 1099 | (NAG37)s(invAb)suugaagcaUfGfGfuguuucagaas(invAb) | 1432 |
| AD12367 | usCfsasGfaAfuccugUfcUfuGfuCfausu | 1100 | (NAG37)s(invAb)saaugacaaGfAfCfaggauucugas(invAb) | 1433 |
| AD12368 | usCfsasAfuGfcugucUfgAfgAfaGfcasg | 1101 | (NAG37)s(invAb)scugcuucuCfAfGfacagcauugas(invAb) | 1434 |
| AD12369 | usCfscsUfuUfaaaggUfuUfuCfaGfuasg | 1102 | (NAG37)s(invAb)scuacugaaAfAfCfcuuuaaaggas(invAb) | 1435 |
| AD12370 | usAfscsUfuCfaucagAfuCfuUfaGfagsu | 1103 | (NAG37)s(invAb)sacucuaagAfUfCfugaugaaguas(invAb) | 1436 |
| AD12371 | usAfsasGfuUfuagucAfaCfuUfcCfcasa | 1104 | (NAG37)s(invAb)suugggaagUfUfGfacuaaacuuas(invAb) | 1437 |
| AD12372 | usCfsasAfuGfcugucUfgAfgAfaGfcasg | 1101 | (NAG37)s(invAb)scugcuucuCfAfGfacaguauugas(invAb) | 1438 |
| AD12583 | usGfsusGfuAfggcugCfaCfuGfaGfagsu | 1105 | (NAG37)s(invAb)sacucucagUfGfCfagccuacacas(invAb) | 1439 |
| AD12584 | usUfsgsUfgUfaggcuGfcAfcUfgAfgasg | 1106 | (NAG37)s(invAb)scucucaguGfCfAfgccuacacaas(invAb) | 1440 |
| AD12585 | usCfsusUfuGfuguagGfcUfgCfaCfugsa | 1107 | (NAG37)s(invAb)sucagugcaGfCfCfuacacaaagas(invAb) | 1441 |
| AD12586 | usUfscsCfuUfuguguAfgGfcUfgCfacsu | 1108 | (NAG37)s(invAb)sagugcagcCfUfAfcacaaaggaas(invAb) | 1442 |
| AD12587 | usUfscsGfaAfgugcaCfcAfgGfcGfgusa | 1109 | (NAG37)s(invAb)suaccgccuGfGfUfgcacuucgaas(invAb) | 1443 |
| AD12588 | usCfsusCfgAfagugcAfcCfaGfgCfggsu | 1110 | (NAG37)s(invAb)saccgccugGfUfGfcacuucgagas(invAb) | 1444 |
| AD12589 | usGfscsUfcGfaagugCfaCfcAfgGfcgsg | 1111 | (NAG37)s(invAb)sccgccuggUfGfCfacuucgagcas(invAb) | 1445 |
| AD12590 | asGfsgsCfuCfgaaguGfcAfcCfaGfgcsg | 1112 | (NAG37)s(invAb)scgccugguGfCfAfcuucgagccus(invAb) | 1446 |
| AD12591 | asAfscsUfcUfucaguGfuUfuCfcAfgcsg | 1113 | (NAG37)s(invAb)scgcuggaaAfCfAfcugaagaguus(invAb) | 1447 |
| AD12592 | usAfscsAfgGfgucucCfcAfcUfuUfgasu | 1114 | (NAG37)s(invAb)saucaaaguGfGfGfagacccuguas(invAb) | 1448 |
| AD12593 | asCfsasCfaGfggucuCfcCfaCfuUfugsa | 1115 | (NAG37)s(invAb)sucaaagugGfGfAfgacccugugus(invAb) | 1449 |
| AD12594 | usGfsusAfcAfcagggUfcUfcCfcAfcusu | 1116 | (NAG37)s(invAb)saagugggaGfAfCfccuguguacas(invAb) | 1450 |
| AD12595 | asGfsgsUfaCfacaggGfuCfuCfcCfacsu | 1117 | (NAG37)s(invAb)sagugggagAfCfCfcuguguaccus(invAb) | 1451 |
| AD12596 | usAfsgsGfuAfcacagGfgUfcUfcCfcasc | 1118 | (NAG37)s(invAb)sgugggagaCfCfCfuguguaccuas(invAb) | 1452 |
| AD12625 | usGfsasAfcAfagucuGfcUfaUfuUfgasu | 1119 | (NAG37)s(invAb)saucaaauaGfCfAfgacuuguucas(invAb) | 1453 |
| AD12626 | usGfscsUfuUfaacuuUfcUfuCfuCfuasg | 1120 | (NAG37)s(invAb)scuagagaaGfAfAfaguuaaagcas(invAb) | 1454 |
| AD12627 | usUfsusGfcUfuuaacUfuUfcUfuCfucsu | 1121 | (NAG37)s(invAb)sagagaagaAfAfGfuuaaagcaaas(invAb) | 1455 |
| AD12628 | usGfsasAfaUfuacaaUfaUfuGfgGfccsu | 1122 | (NAG37)s(invAb)saggcccaaUfAfUfuguaauuucas(invAb) | 1456 |
| AD12629 | usAfsasCfuUfucguuCfuGfaAfgGfgusc | 1123 | (NAG37)s(invAb)sgacccuucAfGfAfacgaaaguuas(invAb) | 1457 |
| AD12630 | usCfsasUfaUfaacuuUfcGfuUfcUfgasa | 1124 | (NAG37)s(invAb)suucagaacGfAfAfaguuauaugas(invAb) | 1458 |
| AD12631 | usUfscsCfaUfaaucaGfuUfaAfaCfggsg | 1125 | (NAG37)s(invAb)scccguuuaAfCfUfgauuauggaas(invAb) | 1459 |
| AD12632 | usUfsasGfgAfaauccAfaUfgCfuGfucsu | 1126 | (NAG37)s(invAb)sagacagcaUfUfGfgauuuccuaas(invAb) | 1460 |
| AD12633 | usAfsasAfgGfacaaaAfuGfgCfaAfuasa | 1127 | (NAG37)s(invAb)suuauugccAfUfUfuuguccuuuas(invAb) | 1461 |
| AD12634 | usAfsasUfcAfaaggaCfaAfaAfuGfgcsa | 1128 | (NAG37)s(invAb)sugccauuuUfGfUfccuuugauuas(invAb) | 1462 |
| AD12953 | usUfsgsauCfacaagCfcAfaAfaccusg | 1129 | (NAG37)s(invAb)scagguuuuGfGfCfuugugaucaas(invAb) | 1429 |
| AD12954 | cPrpusUfsgsauCfacaagCfcAfaAfaccusg | 1130 | (NAG37)s(invAb)scagguuuuGfGfCfuugugaucaas(invAb) | 1429 |
| AD12955 | usUfsgsaucacaagCfcAfaAfaccusg | 1131 | (NAG37)s(invAb)scagguuuuGfGfCfuugugaucaas(invAb) | 1429 |
| AD12956 | cPrpusUfsgsaucacaagCfcAfaAfaccusg | 1132 | (NAG37)s(invAb)scagguuuuGfGfCfuugugaucaas(invAb) | 1429 |
| AD12957 | usCfscsuuUfaaaggUfuUfuCfaguasg | 1133 | (NAG37)s(invAb)scuacugaaAfAfCfcuuuaaaggas(invAb) | 1435 |
| AD12958 | cPrpusCfscsuuUfaaaggUfuUfuCfaguasg | 1134 | (NAG37)s(invAb)scuacugaaAfAfCfcuuuaaaggas(invAb) | 1435 |
| AD12959 | usCfscsuuuaaaggUfuUfuCfaguasg | 1135 | (NAG37)s(invAb)scuacugaaAfAfCfcuuuaaaggas(invAb) | 1435 |
| AD12960 | cPrpusCfscsuuuaaaggUfuUfuCfaguasg | 1136 | (NAG37)s(invAb)scuacugaaAfAfCfcuuuaaaggas(invAb) | 1435 |
| AD12961 | usCfscsuuuaaaggUfuUfuCfagugsg | 1137 | (NAG37)s(invAb)sccacugaaAfAfCfcuuuaaaggas(invAb) | 1463 |
| AD12962 | cPrpusCfscsuuuaaaggUfuUfuCfagugsg | 1138 | (NAG37)s(invAb)sccacugaaAfAfCfcuuuaaaggas(invAb) | 1463 |
| AD12972 | asGfsasaaGfaacuaUfuCfcAfuaausc | 1139 | (NAG37)s(invAb)sgauuauggAfAfUfaguucuuucus(invAb) | 1419 |
| AD12973 | cPrpasGfsasaaGfaacuaUfuCfcAfuaausc | 1140 | (NAG37)s(invAb)sgauuauggAfAfUfaguucuuucus(invAb) | 1419 |
| AD12974 | usGfsasaaGfaacuaUfuCfcAfuaausc | 1141 | (NAG37)s(invAb)sgauuauggAfAfUfaguucuuucas(invAb) | 1464 |
| AD12975 | cPrpusGfsasaaGfaacuaUfuCfcAfuaausc | 1142 | (NAG37)s(invAb)sgauuauggAfAfUfaguucuuucas(invAb) | 1464 |
| AD12976 | cPrpusGfaaaGfaacuaUfuCfcAfuaausc | 1143 | (NAG37)s(invAb)sgauuauggAfAfUfaguucuuucas(invAb) | 1464 |
| AD12977 | asGfsusguUfgucauUfuUfuGfagaasc | 1144 | (NAG37)s(invAb)sguucucaaAfAfAfugacaacacus(invAb) | 1411 |
| AD12978 | cPrpasGfsusguUfgucauUfuUfuGfagaasc | 1145 | (NAG37)s(invAb)sguucucaaAfAfAfugacaacacus(invAb) | 1411 |
| AD12979 | usGfsusguUfgucauUfuUfuGfagaasc | 1146 | (NAG37)s(invAb)sguucucaaAfAfAfugacaacacas(invAb) | 1465 |
| AD12980 | cPrpusGfsusguUfgucauUfuUfuGfagaasc | 1147 | (NAG37)s(invAb)sguucucaaAfAfAfugacaacacas(invAb) | 1465 |
| AD12981 | cPrpusGfsusguU_{UNA}gucauUfuUfuGfagaasc | 1148 | (NAG37)s(invAb)sguucucaaAfAfAfugacaacacas(invAb) | 1465 |
| AD12982 | cPrpusGfuguUfgucauUfuUfuGfagaasc | 1149 | (NAG37)s(invAb)sguucucaaAfAfAfugacaacacas(invAb) | 1465 |
| AD12983 | usGfsusguugucauUfuUfuGfagaasc | 1150 | (NAG37)s(invAb)sguucucaaAfAfAfugacaacacas(invAb) | 1465 |
| AD12984 | cPrpusGfsusguugucauUfuUfuGfagaasc | 1151 | (NAG37)s(invAb)sguucucaaAfAfAfugacaacacas(invAb) | 1465 |
| AD12985 | cPrpusGfuguugucauUfuUfuGfagaasc | 1152 | (NAG37)s(invAb)sguucucaaAfAfAfugacaacacas(invAb) | 1465 |
| AD13113 | usCfsasgaAfuccugUfcUfuGfucausu | 1153 | (NAG37)s(invAb)saaugacaaGfAfCfaggauucugas(invAb) | 1433 |
| AD13114 | cPrpusCfsasgaAfuccugUfcUfuGfucausu | 1154 | (NAG37)s(invAb)saaugacaaGfAfCfaggauucugas(invAb) | 1433 |
| AD13115 | usCfsasgaauccugUfcUfuGfucausu | 1155 | (NAG37)s(invAb)saaugacaaGfAfCfaggauucugas(invAb) | 1433 |
| AD13116 | cPrpusCfsasgaauccugUfcUfuGfucausu | 1156 | (NAG37)s(invAb)saaugacaaGfAfCfaggauucugas(invAb) | 1433 |
| AD13117 | cPrpusCfagaauccugUfcUfuGfucausu | 1157 | (NAG37)s(invAb)saaugacaaGfAfCfaggauucugas(invAb) | 1433 |
| AD13118 | usAfsasguuuagucAfaCfuUfcccasa | 1158 | (NAG37)s(invAb)suugggaagUfUfGfacuaaacuuas(invAb) | 1437 |
| AD13119 | cPrpusAfsasguuuagucAfaCfuUfcccasa | 1159 | (NAG37)s(invAb)suugggaagUfUfGfacuaaacuuas(invAb) | 1437 |
| AD13120 | usUfsusGfaUfcacaaGfcCfaAfaAfccsu | 1160 | (NAG37)s(invAb)sagguuuugGfCfUfugugaucaaas(invAb) | 1466 |
| AD13121 | usGfsusUfgAfucacaAfgCfcAfaAfacsc | 1161 | (NAG37)s(invAb)sgguuuuggCfUfUfgugaucaacas(invAb) | 1467 |
| AD13137 | asGfsasaAfgaacuaUfuCfcAfuaausc | 1162 | (NAG37)s(invAb)sgauuauggAfAfUfaguucuuucus(invAb) | 1419 |
| AD13138 | asGfsasaAfgaacuaUfuCfcAfuaausc | 1162 | (NAG37)s(invAb)sgauuauggAfaUfaGfuucuuucus(invAb) | 1468 |
| AD13139 | asGfsasaAfgaacuaUfuCfcAfuaausc | 1162 | (NAG37)s(invAb)sgauuauggAfaUfaguucuuucus(invAb) | 1469 |
| AD13140 | asGfsasaagAfacuaUfuCfcAfuaausc | 1163 | (NAG37)s(invAb)sgauuauggAfAfUfaguucuuucus(invAb) | 1419 |
| AD13141 | asGfsasaagAfacuaUfuCfcAfuaausc | 1163 | (NAG37)s(invAb)sgauuauggAfaUfaGfuucuuucus(invAb) | 1468 |
| AD13142 | asGfsasaagAfacuaUfuCfcAfuaausc | 1163 | (NAG37)s(invAb)sgauuauggAfaUfaguucuuucus(invAb) | 1469 |
| AD13143 | usAfsgsaaAfgaacuAfuUfcCfauaasu | 1164 | (NAG37)s(invAb)sauuauggaAfUfAfguucuuucuas(invAb) | 1470 |
| AD13144 | usAfsgsaaAfgaacuAfuUfcCfauagsu | 1165 | (NAG37)s(invAb)sacuauggaAfUfAfguucuuucuas(invAb) | 1471 |
| AD13145 | usAfsgsaaAfgaacuAfuUfcCfauagsc | 1166 | (NAG37)s(invAb)sgcuauggaAfUfAfguucuuucuas(invAb) | 1472 |
| AD13278 | asGfsusAfaGfaucugAfaAfcUfaGfucsa | 1167 | (NAG37)s(invAb)sugacuaguUfUfCfagaucuuacus(invAb) | 1473 |
| AD13279 | asGfsusUfaGfuaagaUfcUfgAfaAfcusa | 1168 | (NAG37)s(invAb)suaguuucaGfAfUfcuuacuaacus(invAb) | 1474 |
| AD13280 | usAfsasGfuUfaguaaGfaUfcUfgAfaasc | 1169 | (NAG37)s(invAb)sguuucagaUfCfUfuacuaacuuas(invAb) | 1475 |
| AD13281 | usCfsasUfaAfaacaaGfcAfcAfuGfcasc | 1170 | (NAG37)s(invAb)sgugcauguGfCfUfuguuuuaugas(invAb) | 1476 |
| AD13282 | usUfsgsAfaCfacuucGfcUfuUfgUfcusc | 1171 | (NAG37)s(invAb)sgagacaaaGfCfGfaaguguucaas(invAb) | 1477 |
| AD13283 | asGfsasUfuCfuagagGfuCfaCfuGfgasa | 1172 | (NAG37)s(invAb)suuccagugAfCfCfucuagaaucus(invAb) | 1478 |
| AD13284 | usGfsgsAfaUfaguguGfcAfaAfuGfcusc | 1173 | (NAG37)s(invAb)sgagcauuuGfCfAfcacuauuccas(invAb) | 1479 |
| AD13285 | usUfsgsAfuCfucaaaCfaUfcUfgUfcasu | 1174 | (NAG37)s(invAb)saugacagaUfGfUfuugagaucaas(invAb) | 1480 |
| AD13286 | usAfsgsCfaUfaaguuGfcCfaCfaCfagsa | 1175 | (NAG37)s(invAb)sucugugugGfCfAfacuuaugcuas(invAb) | 1481 |
| AD13287 | usCfsasCfaAfucaagGfuCfuGfgUfcusg | 1176 | (NAG37)s(invAb)scagaccagAfCfCfuugauugugas(invAb) | 1482 |
| AD13288 | asGfsasAfaGfagaguGfcUfuCfuCfccsu | 1177 | (NAG37)s(invAb)sagggagaaGfCfAfcucucuuucus(invAb) | 1483 |
| AD13289 | usGfsusUfaGfagagaGfuUfuGfgUfuusc | 1178 | (NAG37)s(invAb)sgaaaccaaAfCfUfcucucuaacas(invAb) | 1484 |
| AD13290 | usAfsasGfgUfuagagAfgAfgUfuUfggsu | 1179 | (NAG37)s(invAb)saccaaacuCfUfCfucuaaccuuas(invAb) | 1485 |
| AD13291 | usGfsgsUfuUfuguaaCfuUfaCfaUfcasc | 1180 | (NAG37)s(invAb)sgugauguaAfGfUfuacaaaaccas(invAb) | 1486 |
| AD13292 | usCfsasCfuUfucaucAfcAfgGfuGfgusu | 1181 | (NAG37)s(invAb)saaccaccuGfUfGfaugaaagugas(invAb) | 1487 |
| AD13293 | usGfsasUfuAfuaaauGfcAfcCfaGfucsa | 1182 | (NAG37)s(invAb)sugacugguGfCfAfuuuauaaucas(invAb) | 1488 |
| AD13294 | usAfsgsAfgUfuauagUfcAfgAfgCfugsu | 1183 | (NAG37)s(invAb)sacagcucuGfAfCfuauaacucuas(invAb) | 1489 |
| AD13295 | usUfsasGfgAfugcucUfgUfaAfaGfgusa | 1184 | (NAG37)s(invAb)suaccuuuaCfAfGfagcauccuaas(invAb) | 1490 |
| AD13296 | asGfsusUfaGfacuuaAfcUfuAfgUfucsc | 1185 | (NAG37)s(invAb)sggaacuaaGfUfUfaagucuaacus(invAb) | 1491 |
| AD13297 | asGfsusAfaAfuucaaUfcUfcUfcUfgasg | 1186 | (NAG37)s(invAb)scucagagaGfAfUfugaauuuacus(invAb) | 1492 |
| AD13298 | usGfsusUfgAfuguuaAfcCfaGfaGfcusg | 1187 | (NAG37)s(invAb)scagcucugGfUfUfaacaucaacas(invAb) | 1493 |
| AD13299 | asAfsasCfuAfugaugUfcAfgGfuCfaasc | 1188 | (NAG37)s(invAb)sguugaccuGfAfCfaucauaguuus(invAb) | 1494 |
| AD13300 | asCfsasUfuAfacgagAfuCfuGfuUfugsa | 1189 | (NAG37)s(invAb)sucaaacagAfUfCfucguuaaugus(invAb) | 1495 |
| AD13301 | usCfsasGfaAfuauagCfuUfuAfaGfaasc | 1190 | (NAG37)s(invAb)sguucuuaaAfGfCfuauauucugas(invAb) | 1496 |
| AD13322 | asGfsusAfgUfaggucCfuUfuGfuGfuasg | 1191 | (NAG37)s(invAb)scuacacaaAfGfGfaccuacuacus(invAb) | 1497 |
| AD13323 | usUfsgsCfuAfuuugaUfgAfgGfaCfgusc | 1192 | (NAG37)s(invAb)sgacguccuCfAfUfcaaauagcaas(invAb) | 1498 |
| AD13324 | asUfsgsUfaGfaggucUfcAfgUfuCfugsa | 1193 | (NAG37)s(invAb)sucagaacuGfAfGfaccucuacaus(invAb) | 1499 |
| AD13325 | asAfsasGfaAfaauguAfgAfgGfuCfucsa | 1194 | (NAG37)s(invAb)sugagaccuCfUfAfcauuuucuuus(invAb) | 1500 |
| AD13326 | asCfsgsAfaAfaauguGfaAfaAfuCfacsa | 1195 | (NAG37)s(invAb)sugugauuuUfCfAfcauuuuucgus(invAb) | 1501 |
| AD13327 | usUfsasCfuGfaagucCfuAfcUfaAfgusu | 1196 | (NAG37)s(invAb)saacuuaguAfGfGfacuucaguaas(invAb) | 1502 |
| AD13328 | asGfsasUfaAfacggaGfaAfgCfaGfgasg | 1197 | (NAG37)s(invAb)scuccugcuUfCfUfccguuuaucus(invAb) | 1503 |
| AD13329 | asCfsasUfuCfuaggaUfaUfuCfuUfccsa | 1198 | (NAG37)s(invAb)suggaagaaUfAfUfccuagaaugus(invAb) | 1504 |
| AD13330 | usAfsasCfuGfacauaUfgCfuUfuCfcusu | 1199 | (NAG37)s(invAb)saaggaaagCfAfUfaugucaguuas(invAb) | 1505 |
| AD13444 | usCfscsUfuUfaaaggUfuUfuCfaGfuasg | 1102 | (NAG37)s(invAb)scuacugaaAfAfCfcuuuaaaigas(invAb) | 1506 |
| AD13445 | cPrpusCfscsUfuUfaaaggUfuUfuCfaGfuasg | 1200 | (NAG37)s(invAb)scuacugaaAfAfCfcuuuaaaigas(invAb) | 1506 |
| AD13446 | usCfscsUfuuaaaggUfuUfuCfaguasg | 1201 | (NAG37)s(invAb)scuacugaaAfAfCfcuuuaaaigas(invAb) | 1506 |
| AD13447 | cPrpusCfscsUfuuaaaggUfuUfuCfaguasg | 1202 | (NAG37)s(invAb)scuacugaaAfAfCfcuuuaaaigas(invAb) | 1506 |
| AD13448 | usCfscsuuuAfaaggUfuUfuCfaguasg | 1203 | (NAG37)s(invAb)scuacugaaAfAfCfcuuuaaaggas(invAb) | 1435 |
| AD13449 | usCfscsuuuAfaaggUfuUfuCfaguasg | 1203 | (NAG37)s(invAb)scuacugaaAfaCfcUfuuaaaggas(invAb) | 1507 |
| AD13450 | usCfscsUfuuaaaggUfuUfuCfaguasg | 1201 | (NAG37)s(invAb)scuacugaaAfAfCfcuuuaaaggas(invAb) | 1435 |
| AD13451 | usCfscsUfuuaaaggUfuUfuCfaguasg | 1201 | (NAG37)s(invAb)scuacugaaAfaCfcUfuuaaaggas(invAb) | 1507 |
| AD13452 | usAfsgsGfuacacagGfgUfcUfcccasc | 1204 | (NAG37)s(invAb)sgugggagaCfCfCfuguguaccuas(invAb) | 1452 |
| AD13453 | usAfsgsguAfcacagGfgUfcUfcccasc | 1205 | (NAG37)s(invAb)sgugggagaCfCfCfuguguaccuas(invAb) | 1452 |
| AD13454 | usAfsgsguaCfacagGfgUfcUfcccasc | 1206 | (NAG37)s(invAb)sgugggagaCfCfCfuguguaccuas(invAb) | 1452 |
| AD13455 | cPrpusAfsgsguaCfacagGfgUfcUfcccasc | 1207 | (NAG37)s(invAb)sgugggagaCfCfCfuguguaccuas(invAb) | 1452 |
| AD13456 | usAfsgsguaCfacagGfgUfcUfcccasc | 1206 | (NAG37)s(invAb)sgugggagaCfcCfuGfuguaccuas(invAb) | 1508 |
| AD13457 | usAfsgsguaCfacagGfgUfcUfcccasc | 1206 | (NAG37)s(invAb)sgugggagaCfCfCfuguguaucuas(invAb) | 1509 |
| AD13458 | usAfsgsguaCfacagGfgUfcUfcccasu | 1208 | (NAG37)s(invAb)sgugggagaCfCfCfuguguaccuas(invAb) | 1452 |
| AD13459 | usAfsgsguaCfacagGfgUfcUfccuasc | 1209 | (NAG37)s(invAb)sgugggagaCfCfCfuguguaccuas(invAb) | 1452 |
| AD13507 | cPrpusCfaGfaauccugUfcUfuGfucausu | 1210 | (NAG37)s(invAb)saaugacaaGfAfCfaggauucugas(invAb) | 1433 |
| AD13508 | cPrpusCfagAfauccugUfcUfuGfucausu | 1211 | (NAG37)s(invAb)saaugacaaGfAfCfaggauucugas(invAb) | 1433 |
| AD13509 | cPrpusCfagaaUfccugUfcUfuGfucausu | 1212 | (NAG37)s(invAb)saaugacaaGfAfCfaggauucugas(invAb) | 1433 |
| AD13510 | cPrpasCfagaauccugUfcUfuGfucausu | 1213 | (NAG37)s(invAb)saaugacaaGfAfCfaggauucugus(invAb) | 1510 |
| AD13511 | asCfagaauccugUfcUfuGfucausu | 1214 | (NAG37)s(invAb)saaugacaaGfAfCfaggauucugus(invAb) | 1510 |
| AD13512 | cPrpusCfagaauccugUfcUfuGfucausu | 1157 | (NAG37)s(invAb)saaugacaaGfaCfaGfgauucugas(invAb) | 1511 |
| AD13513 | cPrpusCfagaauccugUfcUfuGfucgusu | 1215 | (NAG37)s(invAb)saacgacaaGfAfCfaggauucugas(invAb) | 1512 |
| AD13514 | cPrpusCfagaauccugUfcUfuGfucausc | 1216 | (NAG37)s(invAb)sgaugacaaGfAfCfaggauucugas(invAb) | 1513 |
| AD13515 | cPrpasCfaGfaauccugUfcUfuGfucausc | 1217 | (NAG37)s(invAb)sgaugacaaGfaCfaGfgauucugus(invAb) | 1514 |
| AD13516 | cPrpasCfaGfaauccugUfcUfuGfucausc | 1217 | (NAG37)s(invAb)sgaugacaaGfAfCfaggauucugus(invAb) | 1515 |
| AD13535 | asGfsgsCfaUfcuaauAfuUfcCfaGfgasc | 1218 | (NAG37)s(invAb)sguccuggaAfUfAfuuagaugccus(invAb) | 1516 |
| AD13536 | asGfscsAfuCfuaauaUfuCfcAfgGfacsa | 1219 | (NAG37)s(invAb)suguccuggAfAfUfauuagaugcus(invAb) | 1517 |
| AD13537 | asAfsgsGfcAfucuaaUfaUfuCfcAfggsa | 1220 | (NAG37)s(invAb)succuggaaUfAfUfuagaugccuus(invAb) | 1518 |
| AD13705 | cPrpusGfuguUfgucauUfuUfuGfagaasc | 1149 | (NAG37)s(invAb)sguucucaaAfaAfuGfacaacacas(invAb) | 1519 |
| AD13706 | cPrpusGfuguuGfucauUfuUfuGfagaasc | 1221 | (NAG37)s(invAb)sguucucaaAfAfAfugacaacacas(invAb) | 1465 |
| AD13707 | cPrpusGfuGfuugucauUfuUfuGfagaasc | 1222 | (NAG37)s(invAb)sguucucaaAfAfAfugacaacacas(invAb) | 1465 |
| AD13708 | usAfsasucaAfaggaCfaAfaAfuggcsa | 1223 | (NAG37)s(invAb)sugccauuuUfGfUfccuuugauuas(invAb) | 1462 |
| AD13709 | cPrpusAfaucaAfaggaCfaAfaAfuggcsa | 1224 | (NAG37)s(invAb)sugccauuuUfGfUfccuuugauuas(invAb) | 1462 |
| AD13710 | cPrpusAfaucaAfaggaCfaAfaAfuggcsa | 1224 | (NAG37)s(invAb)sugccauuuUfgUfcCfuuugauuas(invAb) | 1520 |
| AD13711 | usAfsasUfcaaaggaCfaAfaAfuggcsa | 1225 | (NAG37)s(invAb)sugccauuuUfGfUfccuuugauuas(invAb) | 1462 |
| AD13712 | cPrpusAfaUfcaaaggaCfaAfaAfuggcsa | 1226 | (NAG37)s(invAb)sugccauuuUfGfUfccuuugauuas(invAb) | 1462 |
| AD13804 | asCfagAfauccugUfcUfuGfucausu | 1227 | (NAG37)s(invAb)saaugacaaGfAfCfaggauucugus(invAb) | 1510 |
| AD13805 | asCfagAfauccugUfcUfuGfucgusu | 1228 | (NAG37)s(invAb)saacgacaaGfAfCfaggauucugus(invAb) | 1521 |
| AD13805.1 | isCfagAfauccugUfcUfuGfucgusu | 1229 | (NAG37)s(invAb)saacgacaaGfAfCfaggauucugus(invAb) | 1521 |
| AD13806 | asCfagAfauccugUfcUfuGfucausc | 1230 | (NAG37)s(invAb)sgaugacaaGfAfCfaggauucugus(invAb) | 1515 |
| AD13921 | usUfsasggaAfauccAfaUfgCfugucsu | 1231 | (NAG37)s(invAb)sagacagcaUfUfGfgauuuccuaas(invAb) | 1460 |
| AD13922 | cPrpusUfsasggaAfauccAfaUfgCfugucsu | 1232 | (NAG37)s(invAb)sagacagcaUfUfGfgauuuccuaas(invAb) | 1460 |
| AD13923 | usAfsusugaAfgcauUfgAfgAfcaccsa | 1233 | (NAG37)s(invAb)suggugucuCfAfAfugcuucaauas(invAb) | 1415 |
| AD13924 | cPrpusAfuugaAfgcauUfgAfgAfcaccsa | 1234 | (NAG37)s(invAb)suggugucuCfAfAfugcuucaauas(invAb) | 1415 |
| AD13925 | usAfsusugaAfgcauUfgAfgAfcaccsg | 1235 | (NAG37)s(invAb)scggugucuCfAfAfugcuucaauas(invAb) | 1522 |
| AD13926 | usAfsusugaAfgcauUfgAfgAfcaucsg | 1236 | (NAG37)s(invAb)scgaugucuCfAfAfugcuucaauas(invAb) | 1523 |
| AC003589 | cPrpusCfagAfauccugUfcUfuGfucgusu | 1237 | (NAG37)s(invAb)saacgacaaGfAfCfaggauucugas(invAb) | 1539 |
| AC003590 | cPrpusCfagAfauccugUfcUfuGfucausc | 1238 | (NAG37)s(invAb)sgaugacaaGfAfCfaggauucugas(invAb) | 1540 |
| AC003591 | cPrpusCfagAfauccugUfcUfuGfucgusc | 1239 | (NAG37)s(invAb)sgacgacaaGfAfCfaggauucugas(invAb) | 1524 |
| AC003592 | cPrpusCfagAfaUUNAccugUfcUfuGfucgusu | 1240 | (NAG37)s(invAb)saacgacaaGfAfCfaggauucugas(invAb) | 1539 |
| AC003593 | usUfuaAfcuuucuUfcUfcUfagccsu | 1241 | (NAG37)s(invAb)saggcuagaGfAfAfgaaaguuaaas(invAb) | 1525 |
| AC003625 | usAfsgsaAfuccuguCfuUfgUfcauusc | 1242 | (NAG37)s(invAb)sgaaugacaAfGfAfcaggauucuas(invAb) | 1526 |
| AC003626 | usUfscsaGfaauccuGfuCfuUfgucasc | 1243 | (NAG37)s(invAb)sgugacaagAfCfAfggauucugaas(invAb) | 1527 |
| AC003891 | isCfagAfauccugUfcUfuGfucgusu | 1244 | (NAG37)s(invAb)saacgacaaGfAfCfaggauucugus(invAb) | 1541 |
| AC004186 | asGfsgcauCfuaauauUfcCfaggsusu | 1245 | (NAG37)sccuggaAfuAfUfUfAfgaugccuus(invAb) | 1528 |
| AC006749 | usCfuuUfguguagGfcUfgCfacugsa | 1246 | (NAG37)s(invAb)sucagugcaGfCfCfuacacaaagas(invAb) | 1535 |
| AC006750 | asAfcuCfuucaguGfuUfuCfcagcsg | 1247 | (NAG37)s(invAb)scgcuggaaAfCfAfcugaagaguus(invAb) | 1536 |
| AC006751 | usAfggUfacacagGfgUfcUfcccasc | 1248 | (NAG37)s(invAb)sgugggagaCfCfCfuguguaccuas(invAb) | 1537 |
| AC007084 | cPrpusGfaaagaacuaguCfcauaausc | 1249 | (NAG37)s(invAb)sgauuauggAfAfUfaggucuuucas(invAb) | 1534 |
| AC007085 | cPrpusGfaaaGfaacuaUfuCfcAfuaasusc | 1250 | (NAG37)s(invAb)sgauuauggAfAfUfaguucuuucas(invAb) | 1538 |

(A^{2N}) = 2-aminoadenine-containing nucleotide; I = hypoxanthine (inosine) nucleotide

[0168] In some embodiments, a MARC1 RNAi agent is prepared or provided as a salt, mixed salt, or a free-acid. The RNAi agents described herein, upon delivery to a cell expressing a MARC1 gene, inhibit or knockdown expression of one or more MARC1 genes in vivo and/or in vitro.

### Targeting Ligands or Groups, Linking Groups, and Delivery Vehicles

[0169] In some embodiments, a MARC1 RNAi agent is conjugated to one or more non-nucleotide groups including, but not limited to, a targeting group, a linking group, a targeting ligand, a delivery polymer, or a delivery vehicle. The non-nucleotide group can enhance targeting, delivery or attachment of the RNAi agent. Examples of targeting groups and linking groups are provided in Table 7. The non-nucleotide group can be covalently linked to the 3′ and/or 5′ end of either the sense strand and/or the antisense strand. In some embodiments, a MARC1 RNAi agent contains a non-nucleotide group linked to the 3′ and/or 5′ end of the sense strand. In some embodiments, a non-nucleotide group is linked to the 5′ end of a MARC1 RNAi agent sense strand. A non-nucleotide group may be linked directly or indirectly to the RNAi agent via a linker/linking group. In some embodiments, a non-nucleotide group is linked to the RNAi agent via a labile, cleavable, or reversible bond or linker.

[0170] In some embodiments, a non-nucleotide group enhances the pharmacokinetic or biodistribution properties of an RNAi agent or conjugate to which it is attached to improve cell- or tissue-specific distribution and cell-specific uptake of the RNAi agent or conjugate. In some embodiments, a non-nucleotide group enhances endocytosis of the RNAi agent.

[0171] Targeting groups or targeting moieties enhance the pharmacokinetic or biodistribution properties of a conjugate or RNAi agent to which they are attached to improve cell-specific (including, in some cases, organ specific) distribution and cell-specific (or organ specific) uptake of the conjugate or RNAi agent. A targeting group can be monovalent, divalent, trivalent, tetravalent, or have higher valency for the target to which it is directed. Representative targeting groups include, without limitation, compounds with affinity to cell surface molecules, cell receptor ligands, haptens, antibodies, monoclonal antibodies, antibody fragments, and antibody mimics with affinity to cell surface molecules.

[0172] In some embodiments, a targeting group is linked to an RNAi agent using a linker, such as a PEG linker or one, two, or three abasic and/or ribitol (abasic ribose) residues, which can in some instances serve as linkers. In some embodiments, a targeting ligand comprises a galactose-derivative cluster.

[0173] The MARC1 RNAi agents described herein can be synthesized having a reactive group, such as an amino group (also referred to herein as an amine), at the 5′-terminus and/or the 3′-terminus. The reactive group can be used subsequently to attach a targeting moiety using methods typical in the art.

[0174] In some embodiments, a targeting group comprises an asialoglycoprotein receptor ligand. As used herein, an asialoglycoprotein receptor ligand is a ligand that contains a moiety having affinity for the asialoglycoprotein receptor. As noted herein, the asialoglycoprotein receptor is highly expressed on hepatocytes. In some embodiments, an asialoglycoprotein receptor ligand includes or consists of one or more galactose derivatives. As used herein, the term galactose derivative includes both galactose and derivatives of galactose having affinity for the asialoglycoprotein receptor that is equal to or greater than that of galactose. Galactose derivatives include, but are not limited to: galactose, galactosamine, N-formylgalactosamine, N-acetyl-galactosamine, N-propionyl-galactosamine, N-n-butanoyl-galactosamine, and N-iso-butanoylgalactos-amine (see for example: S.T. Iobst and K. Drickamer, J. B. C., 1996, 271, 6686). Galactose derivatives, and clusters of galactose derivatives, that are useful for in vivo targeting of oligonucleotides and other molecules to the liver are known in the art (see, for example, Baenziger and Fiete, 1980, Cell, 22, 611-620; Connolly et al., 1982, J. Biol. Chem., 257, 939-945).

[0175] Galactose derivatives have been used to target molecules to hepatocytes in vivo through their binding to the asialoglycoprotein receptor expressed on the surface of hepatocytes. Binding of asialoglycoprotein receptor ligands to the asialoglycoprotein receptor(s) facilitates cell-specific targeting to hepatocytes and endocytosis of the molecule into hepatocytes. Asialoglycoprotein receptor ligands can be monomeric (e.g., having a single galactose derivative, also referred to as monovalent or monodentate) or multimeric (e.g., having multiple galactose derivatives). The galactose derivative or galactose derivative cluster can be attached to the 3′ or 5′ end of the sense or antisense strand of the RNAi agent using methods known in the art.

[0176] The preparation of targeting ligands, such as galactose derivative clusters, is described in, for example, International Patent Application Publication No. WO 2018/044350 to Arrowhead Pharmaceuticals, Inc., and International Patent Application Publication No. WO 2017/156012 to Arrowhead Pharmaceuticals, Inc., the contents of both of which are incorporated by reference herein in their entirety.

[0177] As used herein, a galactose derivative cluster comprises a molecule having two to four terminal galactose derivatives. A terminal galactose derivative is attached to a molecule through its C-1 carbon. In some embodiments, the galactose derivative cluster is a galactose derivative trimer (also referred to as tri-antennary galactose derivative or tri-valent galactose derivative). In some embodiments, the galactose derivative cluster comprises N-acetyl-galactosamine moieties. In some embodiments, the galactose derivative cluster comprises three N-acetyl-galactosamine moieties. In some embodiments, the galactose derivative cluster is a galactose derivative tetramer (also referred to as tetra-antennary galactose derivative or tetra-valent galactose derivative). In some embodiments, the galactose derivative cluster comprises four N-acetyl-galactosamine moieties.

[0178] As used herein, a galactose derivative trimer contains three galactose derivatives, each linked to a central branch point. As used herein, a galactose derivative tetramer contains four galactose derivatives, each linked to a central branch point. The galactose derivatives can be attached to the central branch point through the C-1 carbons of the saccharides. In some embodiments, the galactose derivatives are linked to the branch point via linkers or spacers. In some embodiments, the linker or spacer is a flexible hydrophilic spacer, such as a PEG group (see. e.g., U.S. Pat. No. 5,885,968; Biessen et al. J. Med. Chem. 1995 Vol. 39 p. 1538-1546). In some embodiments, the PEG spacer is a PEG3 spacer. The branch point can be any small molecule which permits attachment of three galactose derivatives and further permits attachment of the branch point to the RNAi agent. An example of branch point group is a di-lysine or di-glutamate. Attachment of the branch point to the RNAi agent can occur through a linker or spacer. In some embodiments, the linker or spacer comprises a flexible hydrophilic spacer, such as, but not limited to, a PEG spacer. In some embodiments, the linker comprises a rigid linker, such as a cyclic group. In some embodiments, a galactose derivative comprises or consists of N-acetyl-galactosamine. In some embodiments, the galactose derivative cluster is comprised of a galactose derivative tetramer, which can be, for example, an N-acetyl-galactosamine tetramer.

[0179] Embodiments of the present disclosure include pharmaceutical compositions for delivering a MARC1 RNAi agent to a liver cell in vivo. Such pharmaceutical compositions can include, for example, a MARC1 RNAi agent conjugated to a galactose derivative cluster. In some embodiments, the galactose derivative cluster is comprised of a galactose derivative trimer, which can be, for example, an N-acetyl-galactosamine trimer, or galactose derivative tetramer, which can be, for example, an N-acetyl-galactosamine tetramer.

[0180] A targeting ligand or targeting group can be linked to the 3′ or 5′ end of a sense strand or an antisense strand of a MARC1 RNAi agent disclosed herein.

[0181] Targeting ligands include, but are not limited to (NAG37) and (NAG37) s as defined in Table 7. Other targeting groups and targeting ligands, including galactose cluster targeting ligands, are known in the art.

[0182] In some embodiments, a linking group is conjugated to the RNAi agent. The linking group facilitates covalent linkage of the agent to a targeting group, delivery polymer, or delivery vehicle. The linking group can be linked to the 3′ and/or the 5′ end of the RNAi agent sense strand or antisense strand. In some embodiments, the linking group is linked to the RNAi agent sense strand. In some embodiments, the linking group is conjugated to the 5′ or 3′ end of an RNAi agent sense strand. In some embodiments, a linking group is conjugated to the 5′ end of an RNAi agent sense strand. Examples of linking groups, can include, but are not limited to: reactive groups such a primary amines and alkynes, alkyl groups, abasic nucleotides, ribitol (abasic ribose), and/or PEG groups.

[0183] In some embodiments, a targeting group is linked internally to a nucleotide on the sense strand and/or the antisense strand of the RNAi agent. In some embodiments, a targeting group is linked to the RNAi agent via a linker.

[0184] A linker or linking group is a connection between two atoms that links one chemical group (such as an RNAi agent) or segment of interest to another chemical group (such as a targeting group or delivery polymer) or segment of interest via one or more covalent bonds. A labile linkage contains a labile bond. A linkage can optionally include a spacer that increases the distance between the two joined atoms. A spacer can further add flexibility and/or length to the linkage. Spacers include, but are not be limited to, alkyl groups, alkenyl groups, alkynyl groups, aryl groups, aralkyl groups, aralkenyl groups, and aralkynyl groups: each of which can contain one or more heteroatoms, heterocycles, amino acids, nucleotides, and saccharides. Spacer groups are well known in the art and the preceding list is not meant to limit the scope of the description.

[0185] In some embodiments, when two or more RNAi agents are included in a single composition, each of the RNAi agents may be linked to the same targeting group or two a different targeting groups (i.e., targeting groups having different chemical structure). In some embodiments, targeting groups are linked to the MARC1 RNAi agents disclosed herein without the use of an additional linker. In some embodiments, the targeting group itself is designed having a linker or other site to facilitate conjugation readily present. In some embodiments, when two or more MARC1 RNAi agents are included in a single molecule, each of the RNAi agents may utilize the same linker or different linkers (i.e., linkers having different chemical structures).

[0186] Any of the MARC1 RNAi agent nucleotide sequences listed in Tables 2, 3, 4, 5, or 6D, whether modified or unmodified, can contain 3′ and/or 5′ targeting group(s) or linking group(s). Any of the MARC1 RNAi agent sequences listed in Table 3, 4, or 6D, or are otherwise described herein, which contain a 3′ or 5′ targeting group or linking group, can alternatively contain no 3′ or 5′ targeting group or linking group, or can contain a different 3′ or 5′ targeting group or linking group including, but not limited to, those depicted in Table 7. Any of the MARC1 RNAi agent duplexes listed in Tables 6A, 6B, 6C, or 6D, whether modified or unmodified, can further comprise a targeting group or linking group, including, but not limited to, those depicted in Table 7, and the targeting group or linking group can be attached to the 3′ or 5′ terminus of either the sense strand or the antisense strand of the MARC1 RNAi agent duplex.

[0187] Examples of targeting groups and linking groups (which when combined can form targeting ligands) are provided in Table 7. Table 5 and Table 6D provide certain embodiments of MARC1 RNAi agent sense strands having a targeting group or linking group linked to the 5′ or 3′ end.

TABLE 7
Structures Representing Various Modified Nucleotides, Targeting Ligands or Targeting Groups,
Capping Residues, and Linking Groups

[chemical structure]

cPrpu

[chemical structure]

cPrpus

[chemical structure]

cPrpa

[chemical structure]

cPrpas

[chemical structure]

A_{UNA}

[chemical structure]

A_{UNA}s

[chemical structure]

C_{UNA}

[chemical structure]

C_{UNA}s

[chemical structure]

G_{UNA}

[chemical structure]

G_{UNA}s

[chemical structure]

U_{UNA}

[chemical structure]

U_{UNA}s

[chemical structure]

a_2N

[chemical structure]

a_2Ns

[chemical structure]

[chemical structure]

[chemical structure]

(NAG37)

[chemical structure]

(NAG37)s

[0188] In each of the above structures in Table 7, NAG comprises an N-acetyl-galactosamine. In some embodiments, NAG as depicted in Table 7 above can comprise another galactose derivative that has affinity for the asialoglycoprotein receptor present on hepatocytes, as would be understood by a person of ordinary skill in the art to be attached in view of the structures above and description provided herein. Other linking groups known in the art may be used.

[0189] In some embodiments, a delivery vehicle can be used to deliver an RNAi agent to a cell or tissue. A delivery vehicle is a compound that improves delivery of the RNAi agent to a cell or tissue. A delivery vehicle can include, or consist of, but is not limited to: a polymer, such as an amphipathic polymer, a membrane active polymer, a peptide, a melittin peptide, a melittin-like peptide (MLP), a lipid, a reversibly modified polymer or peptide, or a reversibly modified membrane active polyamine. In some embodiments, the RNAi agents can be combined with lipids, nanoparticles, polymers, liposomes, micelles, DPCs or other delivery systems available in the art. The RNAi agents can also be chemically conjugated to targeting groups, lipids (including, but not limited to cholesterol and cholesteryl derivatives), nanoparticles, polymers, liposomes, micelles, DPCs (see, for example WO 2000/053722, WO 2008/0022309, WO 2011/104169, and WO 2012/083185, WO 2013/032829, WO 2013/158141, each of which is incorporated herein by reference), hydrogels, cyclodextrins, biodegradable nanocapsules, and bioadhesive microspheres, proteinaceous vectors, or other delivery systems suitable for nucleic acid or oligonucleotide delivery as known and available in the art.

### Pharmaceutical Compositions

[0190] The MARC1 RNAi agents disclosed herein can be prepared as pharmaceutical compositions or formulations (also referred to herein as “medicaments”). In some embodiments, pharmaceutical compositions include at least one MARC1 RNAi agent. These pharmaceutical compositions are particularly useful in the inhibition of the expression of the target mRNA in a target cell, a group of cells, a tissue, or an organism.

[0191] The pharmaceutical compositions can be used to treat a subject having a disease, disorder, or condition that would benefit from reduction in the level of the target MARC1 mRNA, or inhibition in expression of the target gene. The pharmaceutical compositions can be used to treat a subject at risk of developing a disease, disorder, symptom, or condition that would benefit from reduction of the level of the target mRNA or an inhibition in expression the target gene. In one embodiment, the method includes administering a MARC1 RNAi agent linked to a targeting ligand as described herein, to a subject to be treated. In some embodiments, one or more pharmaceutically acceptable excipients (including vehicles, carriers, diluents, and/or delivery polymers) are added to the pharmaceutical compositions that include a MARC1 RNAi agent, thereby forming a pharmaceutical formulation or medicament suitable for in vivo delivery to a subject, including a human.

[0192] The pharmaceutical compositions that include a MARC1 RNAi agent and methods disclosed herein decrease the level of the target mRNA in a cell, group of cells, group of cells, tissue, organ, or subject, including by administering to the subject a therapeutically effective amount of a herein described MARC1 RNAi agent, thereby inhibiting the expression or translation of MARC1 mRNA in the subject. In some embodiments, the subject has been previously identified as having a pathogenic upregulation of the target gene in hepatocytes. In some embodiments, the subject has been previously identified or diagnosed as having nonalcoholic steatohepatitis (NASH), nonalcoholic fatty liver disease (NAFLD), alcoholic fatty liver disease, autoimmune hepatitis, hepatic fibrosis, cirrhosis, elevated blood cholesterol levels, hypertriglyceridemia, liver disease, and/or other MARC1-related disease. In some embodiments, the subject would benefit from a reduction of MARC1 gene expression in the subject's liver.

[0193] In some embodiments, the described pharmaceutical compositions including a MARC1 RNAi agent are used for treating or managing clinical presentations associated nonalcoholic steatohepatitis (NASH), nonalcoholic fatty liver disease (NAFLD), alcoholic fatty liver disease, autoimmune hepatitis, hepatic fibrosis, cirrhosis, elevated blood cholesterol levels, hypertriglyceridemia, liver disease, and/or other MARC1-related disease. In some embodiments, a therapeutically (including prophylactically) effective amount of one or more of pharmaceutical compositions is administered to a subject in need of such treatment. In some embodiments, administration of any of the disclosed MARC1 RNAi agents can be used to decrease the number, severity, and/or frequency of symptoms of a disease in a subject.

[0194] The described pharmaceutical compositions that include a MARC1 RNAi agent can be used to treat at least one symptom in a subject having a disease or disorder that would benefit from reduction or inhibition in expression of MARC1 mRNA and/or a reduction in MARC1 protein levels. Measuring MARC1 levels can be conducted in accordance with established methods known in the art.

[0195] In some embodiments, the subject is administered a therapeutically effective amount of one or more pharmaceutical compositions that include a MARC1 RNAi agent thereby treating the symptom. In other embodiments, the subject is administered a prophylactically effective amount of one or more MARC1 RNAi agents, thereby preventing or inhibiting the at least one symptom.

[0196] The route of administration is the path by which a MARC1 RNAi agent is brought into contact with the body. In general, methods of administering drugs and oligonucleotides and nucleic acids for treatment of a mammal are well known in the art and can be applied to administration of the compositions described herein. The MARC1 RNAi agents disclosed herein can be administered via any suitable route in a preparation appropriately tailored to the particular route. Thus, herein described pharmaceutical compositions can be administered by injection, for example, intravenously, intramuscularly, intracutaneously, subcutaneously, intraarticularly, or intraperitoneally. In some embodiments, the herein described pharmaceutical compositions are administered via subcutaneous injection.

[0197] The pharmaceutical compositions including a MARC1 RNAi agent described herein can be delivered to a cell, group of cells, tissue, or subject using oligonucleotide delivery technologies known in the art. In general, any suitable method recognized in the art for delivering a nucleic acid molecule (in vitro or in vivo) can be adapted for use with the compositions described herein. For example, delivery can be by local administration, (e.g., direct injection, implantation, or topical administering), systemic administration, or subcutaneous, intravenous, intraperitoneal, or parenteral routes, including intracranial (e.g., intraventricular, intraparenchymal and intrathecal), intramuscular, transdermal, airway (aerosol), nasal, oral, rectal, or topical (including buccal and sublingual) administration. In certain embodiments, the compositions are administered by subcutaneous or intravenous infusion or injection.

[0198] In some embodiments, the pharmaceutical compositions described herein comprise one or more pharmaceutically acceptable excipients. The pharmaceutical compositions described herein are formulated for administration to a subject.

[0199] As used herein, a pharmaceutical composition or medicament includes a pharmacologically effective amount of at least one of the described therapeutic compounds and one or more pharmaceutically acceptable excipients. Pharmaceutically acceptable excipients (excipients) are substances other than the Active Pharmaceutical Ingredient (API, therapeutic product, e.g., MARC1 RNAi agent) that are intentionally included in the drug delivery system. Excipients do not exert or are not intended to exert a therapeutic effect at the intended dosage. Excipients can act to a) aid in processing of the drug delivery system during manufacture, b) protect, support or enhance stability, bioavailability or patient acceptability of the API, c) assist in product identification, and/or d) enhance any other attribute of the overall safety, effectiveness, of delivery of the API during storage or use. A pharmaceutically acceptable excipient may or may not be an inert substance.

[0200] Excipients include, but are not limited to: absorption enhancers, anti-adherents, anti-foaming agents, anti-oxidants, binders, buffering agents, carriers, coating agents, colors, delivery enhancers, delivery polymers, detergents, dextran, dextrose, diluents, disintegrants, emulsifiers, extenders, fillers, flavors, glidants, humectants, lubricants, oils, polymers, preservatives, saline, salts, solvents, sugars, surfactants, suspending agents, sustained release matrices, sweeteners, thickening agents, tonicity agents, vehicles, water-repelling agents, and wetting agents.

[0201] Pharmaceutical compositions suitable for injectable use include sterile aqueous solutions (where water-soluble) or dispersions and sterile powders for the extemporaneous preparation of sterile injectable solutions or dispersion. For intravenous administration, suitable carriers include physiological saline, bacteriostatic water. CremophorR EL™ (BASF. Parsippany. NJ) or phosphate buffered saline (PBS). Suitable carriers should be stable under the conditions of manufacture and storage and should be preserved against the contaminating action of microorganisms such as bacteria and fungi. The carrier can be a solvent or dispersion medium containing, for example, water, ethanol, polyol (for example, glycerol, propylene glycol, and liquid polyethylene glycol), and suitable mixtures thereof. The proper fluidity can be maintained, for example, by the use of a coating such as lecithin, by the maintenance of the required particle size in the case of dispersion and by the use of surfactants. In many cases, it will be preferable to include isotonic agents, for example, sugars, polyalcohols such as mannitol, sorbitol, and sodium chloride in the composition. Prolonged absorption of the injectable compositions can be brought about by including in the composition an agent which delays absorption, for example, aluminum monostearate and gelatin.

[0202] Sterile injectable solutions can be prepared by incorporating the active compound in the required amount in an appropriate solvent with one or a combination of ingredients enumerated above, as required, followed by filter sterilization. Generally, dispersions are prepared by incorporating the active compound into a sterile vehicle, which contains a basic dispersion medium and the required other ingredients from those enumerated above. In the case of sterile powders for the preparation of sterile injectable solutions, methods of preparation include vacuum drying and freeze-drying which yields a powder of the active ingredient plus any additional desired ingredient from a previously sterile-filtered solution thereof.

[0203] In some embodiments, pharmaceutical formulations that include the MARC1 RNAi agents disclosed herein suitable for subcutaneous administration can be prepared in an aqueous sodium phosphate buffer (e.g., the MARC1 RNAi agent formulated in 0.5 mM sodium phosphate monobasic. 0.5 mM sodium phosphate dibasic, in water). In some embodiments, pharmaceutical formulations that include the MARC1 RNAi agents disclosed herein suitable for subcutaneous administration can be prepared in water for injection (sterile water). MARC1 RNAi agents disclosed herein suitable for subcutaneous administration can be prepared in isotonic saline (0).9%).

[0204] Formulations suitable for intra-articular administration can be in the form of a sterile aqueous preparation of the drug that can be in microcrystalline form, for example, in the form of an aqueous microcrystalline suspension. Liposomal formulations or biodegradable polymer systems can also be used to present the drug for both intra-articular and ophthalmic administration.

[0205] Formulations suitable for oral administration of the MARC1 RNAi agents disclosed herein can also be prepared. In some embodiments, the MARC1 RNAi agents disclosed herein are administered orally. In some embodiments, the MARC1 RNAi agents disclosed herein are formulated in a capsule for oral administration.

[0206] The active compounds can be prepared with carriers that will protect the compound against rapid elimination from the body, such as a controlled release formulation, including implants and microencapsulated delivery systems. Biodegradable, biocompatible polymers can be used, such as ethylene vinyl acetate, polyanhydrides, polyglycolic acid, collagen, polyorthoesters, and polylactic acid. Methods for preparation of such formulations will be apparent to those skilled in the art. Liposomal suspensions can also be used as pharmaceutically acceptable carriers. These can be prepared according to methods known to those skilled in the art, for example, as described in U.S. Pat. No. 4,522,811.

[0207] The MARC1 RNAi agents can be formulated in compositions in dosage unit form for ease of administration and uniformity of dosage. Dosage unit form refers to physically discrete units suited as unitary dosages for the subject to be treated: each unit containing a predetermined quantity of active compound calculated to produce the desired therapeutic effect in association with the required pharmaceutical carrier. The specification for the dosage unit forms of the disclosure are dictated by and directly dependent on the unique characteristics of the active compound and the therapeutic effect to be achieved, and the limitations inherent in the art of compounding such an active compound for the treatment of individuals.

[0208] A pharmaceutical composition can contain other additional components commonly found in pharmaceutical compositions. Such additional components include, but are not limited to: anti-pruritics, astringents, local anesthetics, analgesics, antihistamines, or anti-inflammatory agents (e.g., acetaminophen. NSAIDs, diphenhydramine, etc.). It is also envisioned that cells, tissues, or isolated organs that express or comprise the herein defined RNAi agents may be used as “pharmaceutical compositions.” As used herein. “pharmacologically effective amount,” “therapeutically effective amount.” or simply “effective amount” refers to that amount of an RNAi agent to produce a pharmacological, therapeutic, or preventive result.

[0209] In some embodiments, the methods disclosed herein further comprise the step of administering a second therapeutic or treatment in addition to administering an RNAi agent disclosed herein. In some embodiments, the second therapeutic is another MARC1 RNAi agent (e.g., a MARC1 RNAi agent that targets a different sequence within the MARC1 target). In other embodiments, the second therapeutic can be a small molecule drug, an antibody, an antibody fragment, or an aptamer.

[0210] In some embodiments, the described MARC1 RNAi agent(s) are optionally combined with one or more additional therapeutics. The MARC1 RNAi agent and additional therapeutic(s) can be administered in a single composition or they can be administered separately. In some embodiments, the one or more additional therapeutics is administered separately in separate dosage forms from the RNAi agent (e.g., the MARC1 RNAi agent is administered by subcutaneous injection, while the additional therapeutic involved in the method of treatment dosing regimen is administered orally). In some embodiments, the described MARC1 RNAi agent(s) are administered to a subject in need thereof via subcutaneous injection, and the one or more optional additional therapeutics are administered orally, which together provide for a treatment regimen for diseases and conditions associated with nonalcoholic steatohepatitis (NASH), nonalcoholic fatty liver disease (NAFLD), alcoholic fatty liver disease, autoimmune hepatitis, hepatic fibrosis, cirrhosis, elevated blood cholesterol levels, hypertriglyceridemia, liver disease, and/or other MARC1-related disease. In some embodiments, the described MARC1 RNAi agent(s) are administered to a subject in need thereof via subcutaneous injection, and the one or more optional additional therapeutics are administered via a separate subcutaneous injection. In some embodiments, the MARC1 RNAi agent and one or more additional therapeutics are combined into a single dosage form (e.g., a “cocktail” formulated into a single composition for subcutaneous injection). The MARC1 RNAi agents, with or without the one or more additional therapeutics, can be combined with one or more excipients to form pharmaceutical compositions.

[0211] Generally, an effective amount of a MARC1 RNAi agent will be in the range of from about 0.1 to about 100 mg/kg of body weight/dose, e.g., from about 1.0 to about 50 mg/kg of body weight/dose. In some embodiments, an effective amount of an active compound will be in the range of from about 0.25 to about 5 mg/kg of body weight per dose. In some embodiments, an effective amount of an active ingredient will be in the range of from about 0.5 to about 4 mg/kg of body weight per dose. In some embodiments, an effective amount of a MARC1 RNAi agent may be a fixed dose. In some embodiments, the fixed dose is in the range of from about 5 mg to about 1,000 mg of MARC1 RNAi agent. In some embodiments, the fixed does is in the range of 10 to 400 mg of MARC1 RNAi agent. In some embodiments, the fixed does is in the range of 50 to 400 mg of MARC1 RNAi agent. Dosing may be weekly, bi-weekly, monthly, quarterly, or at any other interval depending on the dose of MARC1 RNAi agent administered, the activity level of the particular MARC1 RNAi agent, and the desired level of inhibition for the particular subject. The Examples herein show suitable levels for inhibition in certain animal species. The amount administered will depend on such variables as the overall health status of the patient or subject, the relative biological efficacy of the compound delivered, the formulation of the drug, the presence and types of excipients in the formulation, and the route of administration. Also, it is to be understood that the initial dosage administered can be increased beyond the above upper level to rapidly achieve the desired blood-level or tissue level, or the initial dosage can be smaller than the optimum.

[0212] For treatment of disease or for formation of a medicament or composition for treatment of a disease, the pharmaceutical compositions described herein including a MARC1 RNAi agent can be combined with an excipient or with a second therapeutic agent or treatment including, but not limited to: a second or other RNAi agent, a small molecule drug, an antibody, an antibody fragment, peptide and/or an aptamer.

[0213] The described MARC1 RNAi agents, when added to pharmaceutically acceptable excipients or adjuvants, can be packaged into kits, containers, packs, or dispensers. The pharmaceutical compositions described herein may be packaged in pre-filled syringes. pen injectors, autoinjectors, infusion bags/devices, or vials.

### Methods of Treatment and Inhibition of Expression

[0214] The MARC1 RNAi agents disclosed herein can be used to treat a subject (e.g., a human or other mammal) having a disease or disorder that would benefit from administration of the RNAi agent. In some embodiments, the RNAi agents disclosed herein can be used to treat a subject (e.g., a human) that would benefit from reduction and/or inhibition in expression of MARC1 mRNA and/or MARC1 protein levels, for example, a subject that has been diagnosed with or is suffering from symptoms related to nonalcoholic steatohepatitis (NASH), nonalcoholic fatty liver disease (NAFLD), alcoholic fatty liver disease, autoimmune hepatitis, hepatic fibrosis, cirrhosis, elevated blood cholesterol levels, hypertriglyceridemia, liver disease, and/or other MARC1-related disease.

[0215] In some embodiments, the subject is administered a therapeutically effective amount of any one or more MARC1 RNAi agents. Treatment of a subject can include therapeutic and/or prophylactic treatment. The subject is administered a therapeutically effective amount of any one or more MARC1 RNAi agents described herein. The subject may be an adult, adolescent, child, or infant. Administration of a pharmaceutical composition described herein can be to a human being or animal.

[0216] The MARC1 RNAi agents described herein can be used to treat at least one symptom in a subject having a MARC1-related disease or disorder, or having a disease or disorder that is mediated at least in part by MARC1 gene expression. In some embodiments, the MARC1 RNAi agents are used to treat or manage a clinical presentation of a subject with a disease or disorder that would benefit from or be mediated at least in part by a reduction in MARC1 mRNA or MARC1 protein levels. The subject is administered a therapeutically effective amount of one or more of the MARC1 RNAi agents or MARC1 RNAi agent-containing compositions described herein. In some embodiments, the methods disclosed herein comprise administering a composition comprising a MARC1 RNAi agent described herein to a subject to be treated. In some embodiments, the subject is administered a prophylactically effective amount of any one or more of the described MARC1 RNAi agents, thereby treating the subject by preventing or inhibiting the at least one symptom.

[0217] In certain embodiments, the present disclosure provides methods for treatment of diseases, disorders, conditions, or pathological states mediated at least in part by MARC1 gene expression, in a patient in need thereof, wherein the methods include administering to the patient any of the MARC1 RNAi agents described herein.

[0218] In some embodiments, the gene expression level and/or mRNA level of a MARC1 gene in a subject to whom a described MARC1 RNAi agent is administered is reduced by at least about 30%, 35%, 40%, 45%, 50%, 55%, 60%, 65%, 70%, 75%, 80%, 85%, 95%, 96%, 97%, 98%, 99%, or greater than 99% relative to the subject prior to being administered the MARC1 RNAi agent or to a subject not receiving the MARC1 RNAi agent. The MARC1 mRNA level in the subject may be reduced in a cell, group of cells, and/or tissue of the subject. In some embodiments, the MARC1 gene expression is inhibited by at least about 30%, 35%, 40%, 45% 50%, 55%, 60%, 65%, or greater than 65% in hepatocytes relative to the subject prior to being administered the MARC1 RNAi agent or to a subject not receiving the MARC1 RNAi agent.

[0219] In some embodiments, the MARC1 protein level in a subject to whom a described MARC1 RNAi agent has been administered is reduced by at least about 30%, 35%, 40%, 45%, 50%, 55%, 60%, 65%, 70%, 75%, 80%, 85%, 90%, 95%, 96%, 97%, 98%, 99%, or greater than 99% relative to the subject prior to being administered the MARC1 RNAi agent or to a subject not receiving the MARC1 RNAi agent. The protein level in the subject may be reduced in a cell, group of cells, tissue, blood, and/or other fluid of the subject.

[0220] A reduction in MARC1 mRNA levels and MARC1 protein levels can be assessed by any methods known in the art. As used herein, a reduction or decrease in MARC1 mRNA level and/or protein level are collectively referred to herein as a reduction or decrease in MARC1 or inhibiting or reducing the gene expression of MARC1. The Examples set forth herein illustrate known methods for assessing inhibition of MARC1 gene expression. The person of ordinary skill in the art would further know suitable methods for assessing inhibition of MARC1 gene expression in vivo and/or in vitro.

[0221] In some embodiments, disclosed herein are methods of treatment (including prophylactic or preventative treatment) of diseases, disorders, or symptoms caused by caused by nonalcoholic steatohepatitis (NASH), nonalcoholic fatty liver disease (NAFLD), alcoholic fatty liver disease, autoimmune hepatitis, hepatic fibrosis, cirrhosis, elevated blood cholesterol levels, hypertriglyceridemia, liver disease, and/or other MARC1-related disease, wherein the methods include administering to a subject in need thereof a therapeutically effective amount of a MARC1 RNAi agent that includes an antisense strand that is at least partially complementary to the portion of the MARC1 mRNA having the sequence in Table 1. In some embodiments, disclosed herein are methods of treatment (including prophylactic or preventative treatment) of diseases or symptoms caused by nonalcoholic steatohepatitis (NASH), nonalcoholic fatty liver disease (NAFLD), alcoholic fatty liver disease, autoimmune hepatitis, hepatic fibrosis, cirrhosis, elevated blood cholesterol levels, hypertriglyceridemia, liver disease, and/or other MARC1-related disease, wherein the methods include administering to a subject in need thereof a therapeutically effective amount of a MARC1 RNAi agent that includes an antisense strand comprising the sequence of any of the sequences in Tables 2, 3, or 6D, and a sense strand that comprises any of the sequences in Tables 2, 4, 5, or 6D, that is at least partially complementary to the antisense strand. In some embodiments, disclosed herein are methods of treatment (including prophylactic or preventative treatment) of diseases or symptoms caused by nonalcoholic steatohepatitis (NASH), nonalcoholic fatty liver disease (NAFLD), alcoholic fatty liver disease, autoimmune hepatitis, hepatic fibrosis, cirrhosis, elevated blood cholesterol levels, hypertriglyceridemia, liver disease, and/or other MARC1-related disease, wherein the methods include administering to a subject in need thereof a therapeutically effective amount of a MARC1 RNAi agent that includes a sense strand that comprises any of the sequences in Tables 2, 4, 5, or 6D, and an antisense strand comprising the sequence of any of the sequences in Tables 2, 3, or 6D that is at least partially complementary to the sense strand.

[0222] In some embodiments, disclosed herein are methods for inhibiting expression of a MARC1 gene in a cell, wherein the methods include administering to the cell a MARC1 RNAi agent that includes an antisense strand that is at least partially complementary to the portion of the MARC1 mRNA having the sequence in Table 1. In some embodiments, disclosed herein are methods of inhibiting expression of a MARC1 gene in a cell, wherein the methods include administering to a cell a MARC1 RNAi agent that includes an antisense strand comprising the sequence of any of the sequences in Tables 2, 3, or 6D, and a sense strand that comprises any of the sequences in Tables 2, 4, 5, or 6D that is at least partially complementary to the antisense strand. In some embodiments, disclosed herein are methods of inhibiting expression of a MARC1 gene in a cell, wherein the methods include administering a MARC1 RNAi agent that includes a sense strand that comprises any of the sequences in Tables 2, 4, 5, or 6D, and an antisense strand that includes the sequence of any of the sequences in Tables 2, 3, or 6D that is at least partially complementary to the sense strand.

[0223] The use of MARC1 RNAi agents provides methods for therapeutic (including prophylactic) treatment of diseases/disorders associated with nonalcoholic steatohepatitis (NASH), nonalcoholic fatty liver disease (NAFLD), alcoholic fatty liver disease, autoimmune hepatitis, hepatic fibrosis, cirrhosis, elevated blood cholesterol levels, hypertriglyceridemia, liver disease, and/or other MARC1-related disease. The described MARC1 RNAi agents mediate RNA interference to inhibit the expression of one or more genes necessary for production of MARC1 protein. MARC1 RNAi agents can also be used to treat or prevent various diseases, disorders, or conditions, including nonalcoholic steatohepatitis (NASH), nonalcoholic fatty liver disease (NAFLD), alcoholic fatty liver disease, autoimmune hepatitis, hepatic fibrosis, cirrhosis, elevated blood cholesterol levels, hypertriglyceridemia, liver disease, and/or other MARC1-related disease. Furthermore, compositions for delivery of MARC1 RNAi agents to liver cells, and specifically to hepatocytes. in vivo, are described.

### Cells, Tissues, Organs, and Non-Human Organisms

[0224] Cells, tissues, organs, and non-human organisms that include at least one of the MARC1 RNAi agents described herein are contemplated. The cell, tissue, organ, or non-human organism is made by delivering the RNAi agent to the cell, tissue, organ or non-human organism.

### Additional Illustrative Embodiments

[0225] Provided here are certain additional illustrative embodiments of the disclosed invention. These embodiments are illustrative only and do not limit the scope of the present disclosure or of the claims attached hereto.

[0226] Embodiment 1. An RNAi agent for inhibiting expression of a MARC1 gene, comprising: an antisense strand comprising a nucleotide sequence of at least 15 contiguous nucleotides differing by 0 or 1 nucleotides from 15 contiguous nucleotides of any one of the antisense strand sequences of Table 2, Table 3, or Table 6D; and a sense strand comprising a nucleotide sequence that is at least partially complementary to the antisense strand,

[0227] Embodiment 2. The RNAi agent of Embodiment 1, wherein the antisense strand comprises nucleotides 2-18 of any one of the sequences provided in Table 2, Table 3, or Table 6D.

[0228] Embodiment 3. The RNAi agent of Embodiment 1 or Embodiment 2, wherein the sense strand comprises a nucleotide sequence of at least 15 contiguous nucleotides differing by 0 or 1 nucleotides from 15 contiguous nucleotides of any one of the sense strand sequences of Table 2, Table 4, Table 5, or Table 6D, and wherein the sense strand has a region of at least 85% complementarity over at least 15 contiguous nucleotides to the antisense strand.

[0229] Embodiment 4. The RNAi agent of any one of Embodiments 1-3, wherein at least one nucleotide of the RNAi agent includes a modified internucleoside linkage.

[0230] Embodiment 5. The RNAi agent of any one of Embodiments 1-4, wherein all or substantially all of the nucleotides are modified nucleotides.

[0231] Embodiment 6. The RNAi agent of any one of Embodiments 4-5, wherein the modified nucleotides are independently selected from the group consisting of: 2′-O-methyl nucleotide, 2′-fluoro nucleotide, 2′-deoxy nucleotide, 2′,3′-seco nucleotide mimic, locked nucleotide, 2′-F-arabino nucleotide, 2′-methoxyethyl nucleotide, abasic nucleotide, ribitol, inverted nucleotide, inverted 2′-O-methyl nucleotide, inverted 2′-deoxy nucleotide, 2′-amino-modified nucleotide, 2′-alkyl-modified nucleotide, morpholino nucleotide, vinyl phosphonate-containing nucleotide, cyclopropyl phosphonate-containing nucleotide, and 3′-O-methyl nucleotide.

[0232] Embodiment 7. The RNAi agent of Embodiment 5, wherein all or substantially all of the modified nucleotides are 2′-O-methyl nucleotides, 2′-fluoro nucleotides, or combinations thereof.

[0233] Embodiment 8. The RNAi agent of any one of Embodiments 1-7, wherein the antisense strand consists of or consists essentially of the nucleotide sequence of any one of the modified antisense strand sequences of Table 3.

[0234] Embodiment 9. The RNAi agent of any one of Embodiments 1-8 wherein the sense strand consists of, consists essentially of, or comprises the nucleotide sequence of any of the modified sense strand sequences of Table 4, Table 5, or Table 6D.

[0235] Embodiment 10. The RNAi agent of Embodiment 1, wherein the antisense strand comprises the nucleotide sequence of any one of the modified sequences of Table 3 or Table 6D, and the sense strand comprises the nucleotide sequence of any one of the modified sequences of Table 4, Table 5, or Table 6D.

[0236] Embodiment 11. The RNAi agent of any one of Embodiments 1-10, wherein the sense strand is between 18 and 30 nucleotides in length, and the antisense strand is between 18 and 30 nucleotides in length.

[0237] Embodiment 12. The RNAi agent of Embodiment 11, wherein the sense strand and the antisense strand are each between 18 and 27 nucleotides in length.

[0238] Embodiment 13. The RNAi agent of Embodiment 12, wherein the sense strand and the antisense strand are each between 18 and 24 nucleotides in length.

[0239] Embodiment 14. The RNAi agent of Embodiment 13, wherein the sense strand and the antisense strand are each 21 nucleotides in length.

[0240] Embodiment 15. The RNAi agent of Embodiment 14, wherein the RNAi agent has two blunt ends.

[0241] Embodiment 16. The RNAi agent of any one of Embodiments 1-15, wherein the sense strand comprises one or two terminal caps.

[0242] Embodiment 17. The RNAi agent of any one of Embodiments 1-16, wherein the sense strand comprises one or two inverted abasic residues.

[0243] Embodiment 18. The RNAi agent of Embodiment 1, wherein the RNAi agent is comprised of a sense strand and an antisense strand that form a duplex having the structure of any one of the duplexes in Table 6A and Table 6B.

[0244] Embodiment 19. The RNAi agent of Embodiment 18, wherein all or substantially all of the nucleotides are modified nucleotides.

[0245] Embodiment 20. The RNAi agent of Embodiment 1, comprising an antisense strand that consists of, consists essentially of, or comprises a nucleotide sequence that differs by 0 or 1 nucleotides from one of the following nucleotide sequences (5′→3′):

(SEQ ID NO: 1608)
UGAAAGAACUAUUCCAUAAUC;
(SEQ ID NO: 1657)
ACAGAAUCCUGUCUUGUCGUU;
(SEQ ID NO: 1580)
UCCUUUAAAGGUUUUCAGUAG;
or
(SEQ ID NO: 1659)
UAUUGAAGCAUUGAGACACCG.

[0246] Embodiment 21. The RNAi agent of any one of Embodiments 1-20, wherein the nucleotides of the antisense strand located at position 2 and position 14 from the 5′-end are 2′-fluoro modified nucleotides.

[0247] Embodiment 22. The RNAi agent of Embodiment 21, wherein the nucleotide of the antisense strand at position 2 is a 2′-fluoro uridine, and the nucleotide of the antisense strand at position 14 is a 2′-fluoro cytidine, and wherein the antisense strand comprises 3 or 4 phosphorothioate internucleoside linkages.

[0248] Embodiment 23. The RNAi agent of any one of Embodiments 1-22, wherein the sense strand consists of, consists essentially of, or comprises a nucleotide sequence that differs by 0 or 1 nucleotides from one of the following nucleotide sequences (5′→3′):

(SEQ ID NO: 1734)
GAUUAUGGAAUAGUUCUUUCA;
(SEQ ID NO: 1783)
AACGACAAGACAGGAUUCUGU;
(SEQ ID NO: 1774)
CUACUGAAAACCUUUAAAIGA;
or
(SEQ ID NO: 1784)
CGGUGUCUCAAUGCUUCAAUA

[0249] Embodiment 24. The RNAi agent of any one of Embodiments 20-23, wherein all or substantially all of the nucleotides are modified nucleotides.

[0250] Embodiment 25. The RNAi agent of Embodiment 1, comprising an antisense strand that comprises, consists of, or consists essentially of a modified nucleotide sequence that differs by 0 or 1 nucleotides from one of the following nucleotide sequences (5′→3′):

(SEQ ID NO: 1143)
cPrpusGfaaaGfaacuaUfuCfcAfuaausc;
(SEQ ID NO: 1228)
asCfagAfauccugUfcUfuGfucgusu;
(SEQ ID NO: 1229)
isCfagAfauccugUfcUfuGfucgusu;
(SEQ ID NO: 1200)
cPrpusCfscsUfuUfaaaggUfuUfuCfaGfuasg;
or
(SEQ ID NO: 1235)
usAfsusugaAfgcauUfgAfgAfcaccsg,

wherein a represents 2′-O-methyl adenosine, c represents 2′-O-methyl cytidine, g represents 2′-O-methyl guanosine, i represents 2′-O-methyl inosine; and u represents 2′-O-methyl uridine: Af, represents 2′-fluoro adenosine, Cf represents 2′-fluoro cytidine, Gf represents 2′-fluoro guanosine, and Uf represents 2′-fluoro uridine: cPrpu represents a 5′-cyclopropyl phosphonate-2′-O-methyl uridine: s represents a phosphorothioate linkage; and wherein all or substantially all of the nucleotides on the sense strand are modified nucleotides.

[0251] Embodiment 26. The RNAi agent of Embodiment 1, wherein the sense strand comprises, consists of, or consists essentially of a modified nucleotide sequence that differs by 0 or 1 nucleotides from one of the following nucleotide sequences (5′→3′):

(SEQ ID NO: 1319)
gauuauggAfAfUfaguucuuuca;
(SEQ ID NO: 1376)
aacgacaaGfAfCfaggauucugu;
(SEQ ID NO: 1361)
cuacugaaAfAfCfcuuuaaaiga;
or
(SEQ ID NO: 1377)
cggugucuCfAfAfugcuucaaua,

wherein a represents 2′-O-methyl adenosine, c represents 2′-O-methyl cytidine, g represents 2′-O-methyl guanosine, u represents 2′-O-methyl uridine, and i represents 2′-O-methyl inosine: Af, represents 2′-fluoro adenosine, Cf represents 2′-fluoro cytidine, Gf represents 2′-fluoro guanosine, and Uf represents 2′-fluoro uridine; s represents a phosphorothioate linkage; and wherein all or substantially all of the nucleotides on the antisense strand are modified nucleotides.

[0252] Embodiment 27. The RNAi agent of any one of Embodiments 20-26, wherein the sense strand further includes inverted abasic residues at the 3′ terminal end of the nucleotide sequence, at the 5′ end of the nucleotide sequence, or at both.

[0253] Embodiment 28. The RNAi agent of any one of Embodiments 1-27, wherein the RNAi agent is linked to a targeting ligand.

[0254] Embodiment 29. The RNAi agent of any one of Embodiments 1-28, wherein the targeting ligand comprises:

[chemical structure]

[0255] Embodiment 30. The RNAi agent of any one of Embodiments 1-29, wherein the targeting ligand is linked to the sense strand.

[0256] Embodiment 31. The RNAi agent of Embodiment 30, wherein the targeting ligand is linked to the 5′ terminal end of the sense strand.

[0257] Embodiment 32. A composition comprising the RNAi agent of any one of Embodiments 1-31, wherein the composition further comprises a pharmaceutically acceptable excipient.

[0258] Embodiment 33. The composition of Embodiment 32, further comprising a second RNAi agent capable of inhibiting the expression of a MARC1 gene.

[0259] Embodiment 34. The composition of any one of Embodiments 32-33, further comprising one or more additional therapeutics.

[0260] Embodiment 35. The composition of any one of Embodiments 32-34, wherein the composition is formulated for administration.

[0261] Embodiment 36. The composition of Embodiment 35, wherein the composition is delivered by subcutaneous injection.

[0262] Embodiment 37. The composition of any one of Embodiment 32-36, wherein the pharmaceutically acceptable excipient is a sodium phosphate buffer.

[0263] Embodiment 38. The composition of any one of Embodiment 32-36, wherein the pharmaceutically acceptable excipient is isotonic saline or water for injection.

[0264] Embodiment 39. A method for inhibiting expression of a MARC1 gene in a hepatocyte cell, the method comprising introducing into a cell of a subject an effective amount of an RNAi agent of any one of Embodiments 1-31 or the composition of any one of Embodiments 32-38.

[0265] Embodiment 40. The method of Embodiment 39, wherein the subject is a human subject.

[0266] Embodiment 41. The method of any one of Embodiments 39-40, wherein the MARC1 mRNA levels are reduced by at least about 50% in the hepatocyte cell or in the subject.

[0267] Embodiment 42. The method of any one of Embodiments 39-41, wherein the MARC1 protein levels are reduced by at least about 50% in the hepatocyte cell or in the subject.

[0268] Embodiment 43. A method of treating a MARC1-related disease, disorder, or symptom, the method comprising administering to a human subject in need thereof a therapeutically effective amount of the composition of any one of Embodiments 32-38.

[0269] Embodiment 44. The method of Embodiment 43, wherein the disease is hypertriglyceridemia, nonalcoholic steatohepatitis (NASH), alcoholic and nonalcoholic fatty liver disease (NAFLD), fatty liver disease, cirrhosis, elevated blood cholesterol levels, liver disease, autoimmune hepatitis and/or other MARC1-related disease.

[0270] Embodiment 45. The method of any one of Embodiments 39-44, wherein the level of serum MARC1 protein is decreased in the subject.

[0271] Embodiment 46. The method of any one of Embodiments 39-45, wherein the RNAi agent is administered to a human subject at a dose of about 0.05 mg/kg to about 5.0 mg/kg of body weight of the human subject.

[0272] Embodiment 47. Use of the RNAi agent of any one of Embodiments 1-31 or the composition according to any one of Embodiments 32-38, for the treatment of a disease, disorder, or symptom that is mediated at least in part by a reduction in MARC1 gene expression.

[0273] Embodiment 48. Use according to Embodiment 47, wherein the disease is nonalcoholic steatohepatitis (NASH), nonalcoholic fatty liver disease (NAFLD), alcoholic fatty liver disease, autoimmune hepatitis, hepatic fibrosis, cirrhosis, elevated blood cholesterol levels, hypertriglyceridemia, liver disease, and/or other MARC1-related disease.

[0274] Embodiment 49. Use of the RNAi agent of any one of Embodiments 1-31 or the composition according to any one of Embodiments 32-38, for the preparation of a pharmaceutical composition for treating a disease, disorder, or symptom that is mediated at least in part by a reduction in MARC1 gene expression.

[0275] The above provided embodiments and items are now illustrated with the following, non-limiting examples.

### EXAMPLES

### Example 1. Synthesis of MARC1 RNAi Agents

[0276] MARC1 RNAi agent duplexes shown in Tables 6A and 6B above, were synthesized in accordance with the following general procedures:

### A. Synthesis.

[0277] The sense and antisense strands of the RNAi agents were synthesized according to phosphoramidite technology on solid phase used in oligonucleotide synthesis. Such standard synthesis is generally known in the art. Depending on the scale, either a MerMade96E (R) (Bioautomation), a MerMade12® (Bioautomation), or an OP Pilot 100 (GE Healthcare) was used. Syntheses were performed on a solid support made of controlled pore glass (CPG, 500 Å or 600 Å, obtained from Prime Synthesis, Aston, PA, USA). The monomer positioned at the 3′ end of the respective strand was attached to the solid support as a starting point for synthesis. All RNA and 2′-modified RNA phosphoramidites were purchased from Thermo Fisher Scientific (Milwaukee, WI, USA) or Hongene Biotech (Shanghai, PRC). The 2′-O-methyl phosphoramidites included the following: (5′-O-dimethoxytrityl-N6-(benzoyl)-2′-O-methyl-adenosine-3′-O-(2-cyanoethyl-N,N-diisopropylamino) phosphoramidite, 5′-O-dimethoxy-trityl-N4-(acetyl)-2′-O-methyl-cytidine-3′-O-(2-cyanoethyl-N,N-diisopropyl-amino) phosphoramidite, (5′-O-dimethoxy trityl-N2-(isobutyryl)-2′-O-methyl-guanosine-3′-O-(2-cyanoethyl-N,N-diisopropylamino) phosphoramidite, and 5′-O-dimethoxytrityl-2′-O-methyl-uridine-3′-O-(2-cyanoethyl-N,N-diisopropylamino) phosphoramidite. The 2′-deoxy-2′-fluoro-phosphoramidites carried the same protecting groups as the 2′-O-methyl amidites. 5′-(4,4′-Dimethoxytrityl)-2′,3′-seco-uridine, 2′-benzoyl-3′-[(2-cyanoethyl)-(N,N-diisopropyl)]-phosphoramidite was also purchased from Thermo Fisher Scientific or Hongene Biotech. 5′-dimethoxytrityl-2′-O-methyl-inosine-3′-O-(2-cyanoethyl-N,N-diisopropylamino) phosphoramidites were purchased from Glen Research (Virginia) or Hongene Biotech. The cyclopropyl phosphonate phosphoramidites were synthesized in accordance with International Patent Application Publication No. WO 2017/214112 (see also Altenhofer et. al., Chem. Communications (Royal Soc. Chem.), 57 (55): 6808-6811 (July 2021)). The inverted abasic (3′-O-dimethoxytrityl-2′-deoxyribose-5′-O-(2-cyanoethyl-N,N-diisopropylamino) phosphoramidites were purchased from ChemGenes (Wilmington, MA, USA) or SAFC (St Louis, MO, USA). 5′-O-dimethoxytrityl-N2,N6-(phenoxyacetate)-2′-O-methyl-diaminopurine-3′-O-(2-cyanoethyl-N,N-diisopropylamino) phosphoramidites were obtained from ChemGenes or Hongene Biotech.

[0278] Targeting ligand-containing phosphoramidites were dissolved in anhydrous dichloromethane or anhydrous acetonitrile (50 mM), while all other amidites were dissolved in anhydrous acetonitrile (50 mM), or anhydrous dimethylformamide and molecular sieves (3A) were added. 5-Benzylthio-1H-tetrazole (BTT, 250 mM in acetonitrile), 5-Ethylthio-1H-tetrazole (ETT, 250 mM in acetonitrile), or 4,5-dicyanoimidazole (DCI) was used as activator solution. Coupling times were 12 min (RNA), 15 min (targeting ligand), 90 sec (2′OMe), and 60 sec (2′F). In order to introduce phosphorothioate linkages, a 100 mM solution of 3-phenyl 1,2,4-dithiazoline-5-one (POS, obtained from PolyOrg, Inc., Leominster, MA, USA) in anhydrous Acetonitrile was employed. Each of the MARC1 RNAi agent duplexes synthesized and tested in the following Examples utilized N-acetyl-galactosamine as “NAG” in the targeting ligand chemical structures represented in Table 7. (NAG37) and (NAG37) s targeting ligand phosphoramidite compounds can be synthesized in accordance with International Patent Application Publication No. WO 2018/044350 to Arrowhead Pharmaceuticals, Inc.

### B. Cleavage and Deprotection of Support Bound Oligomer

[0279] After finalization of the solid phase synthesis, the dried solid support was treated with a 1:1 volume solution of 40 wt. % methylamine in water and 28% ammonium hydroxide solution (Aldrich) for 1.5 hours at 30° C. The solution was evaporated and the solid residue was reconstituted in water (see below).

### Purification.

[0280] Crude oligomers were purified by anionic exchange HPLC using a TSKgel SuperQ-5 PW 13 μm column and Shimadzu LC-8 system. Buffer A was 20 mM Tris. 5 mM EDTA. pH 9.0) and contained 20% Acetonitrile and buffer B was the same as buffer A with the addition of 1.5 M sodium chloride. UV traces at 260 nm were recorded. Appropriate fractions were pooled then run on size exclusion HPLC using a GE Healthcare XK 26/40 column packed with Sephadex G-25 fine with a running buffer of filtered DI water or 100 mM ammonium bicarbonate, pH 6.7 and 20% Acetonitrile.

### D. Annealing.

[0281] Complementary strands were mixed by combining equimolar RNA solutions (sense and antisense) in 1×Phosphate-Buffered Saline (Corning, Cellgro) to form the RNAi agents. Some RNAi agents were lyophilized and stored at −15 to −25° C. Duplex concentration was determined by measuring the solution absorbance on a UV-Vis spectrometer in 1× Phosphate-Buffered Saline. The solution absorbance at 260 nm was then multiplied by a conversion factor and the dilution factor to determine the duplex concentration. The conversion factor used was either 0.050 mg/(mL·cm) or was calculated from an experimentally determined extinction coefficient.

### Example 2. hMARC1 SEAP Mouse Model

[0282] To evaluate MARC1 RNAi agents, a MARC1-SEAP mouse model was used. C57b16/Albino mice were transiently transfected in vivo with plasmid by hydrodynamic tail vein (HTV) injection. Mice were injected, via hydrodynamic tail vein (HTV), with plasmid pMIR1015 containing the 33-2500 region of the human MARC1 cDNA sequence (NCBI Reference Sequence: NM_022746.4 (Seq ID No. 1)) inserted into the 3′ UTR of the SEAP (secreted human placental alkaline phosphatase) reporter gene. 50 μg of the plasmid containing the hMARC1 cDNA in Ringer's solution in a total volume of 10% of the animal's body weight was injected, via HTV, to create MARC1-SEAP model mice. Following transfection with MARC1-SEAP, the mice were subsequently administered MARC1 RNAi agents. Inhibition of MARC1 expression by MARC1 RNAi agent results in concomitant inhibition of SEAP expression. SEAP expression levels were measured by Phospha-Light™ SEAP Reporter Gene Assay System (ThermoFisher Cat #T1016). Prior to treatment, SEAP expression levels in serum were measured and the mice were grouped according to average SEAP levels.

Analyses: SEAP levels may be measured at various times, both before and after administration of MARC1 RNAi agents.

[0283] i) Serum collection: Mice were anesthetized with 2-3% isoflurane and blood samples were collected from the submandibular area into serum separation tubes (Sarstedt AG & Co., Nümbrecht, Germany). Blood was allowed to coagulate at ambient temperature for 20 min. The tubes were centrifuged at 8,000×g for 3 min to separate the serum and stored at 4° C.

[0284] ii) Serum SEAP levels: Serum was collected and measured by the Phospha-Light™ SEAP Reporter Gene Assay System (ThermoFisher) according to the manufacturer's instructions. Serum SEAP levels for each animal was normalized to the control group of mice injected with saline in order to account for the non-treatment related decline in MARC1 sequence expression with this model. First, the SEAP level for each animal at a time point was divided by the pre-treatment level of expression in that animal (“pre-treatment”) in order to determine the ratio of expression “normalized to pre-treatment”. Expression at a specific time point was then normalized to the control group by dividing the “normalized to pre-treatment” ratio for an individual animal by the average “normalized to pre-treatment” ratio of all mice in the normal saline control group. Alternatively, in some Examples set forth herein, the serum SEAP levels for each animal were assessed by normalizing to pre-treatment levels only.

### Example 3. In Vivo Administration of MARC1 RNAi Agents in hMARC1-SEAP Mice

[0285] The hMARC1-SEAP model described in Example 2, above, was used. On Day 1, four (n=4) female C57bl/6 albino mice were dosed with either saline or MARC1 RNAi agents formulated in saline (at 2 mg/kg), via subcutaneous (SQ) injection. The dosing regimen is in accordance with Table 8 below.

TABLE 8
Dosing for mice of Example 3

| | | Targeted Position | |
|---|---|---|---|
| | Dose (RNAi | of MARC1 (Seq | |
| Group | Agent) | ID No. 1) | Dosing Route |
| 1 | Isotonic Saline | N/A | Day 1 SQ Injection |
| 2 | 2 mg/kg AD11764 | 325 | Day 1 SQ Injection |
| 3 | 2 mg/kg AD11765 | 536 | Day 1 SQ Injection |
| 4 | 2 mg/kg AD11766 | 609 | Day 1 SQ Injection |
| 5 | 2 mg/kg AD11767 | 611 | Day 1 SQ Injection |
| 6 | 2 mg/kg AD11768 | 636 | Day 1 SQ Injection |
| 7 | 2 mg/kg AD11769 | 640 | Day 1 SQ Injection |
| 8 | 2 mg/kg AD11770 | 644 | Day 1 SQ Injection |
| 9 | 2 mg/kg AD11771 | 710 | Day 1 SQ Injection |
| 10 | 2 mg/kg AD11772 | 841 | Day 1 SQ Injection |
| 11 | 2 mg/kg AD11773 | 932 | Day 1 SQ Injection |
| 12 | 2 mg/kg AD11774 | 940 | Day 1 SQ Injection |
| 13 | 2 mg/kg AD11775 | 945 | Day 1 SQ Injection |
| 14 | 2 mg/kg AD11776 | 954 | Day 1 SQ Injection |
| 15 | 2 mg/kg AD11777 | 1057 | Day 1 SQ Injection |
| 16 | 2 mg/kg AD11778 | 1089 | Day 1 SQ Injection |
| 17 | 2 mg/kg AD11779 | 1098 | Day 1 SQ Injection |
| 18 | 2 mg/kg AD11780 | 1102 | Day 1 SQ Injection |
| 19 | 2 mg/kg AD11781 | 1111 | Day 1 SQ Injection |
| 20 | 2 mg/kg AD11782 | 1190 | Day 1 SQ Injection |
| 21 | 2 mg/kg AD11783 | 1193 | Day 1 SQ Injection |
| 22 | 2 mg/kg AD11784 | 1282 | Day 1 SQ Injection |
| 23 | 2 mg/kg AD11785 | 1310 | Day 1 SQ Injection |
| 24 | 2 mg/kg AD11786 | 1313 | Day 1 SQ Injection |
| 25 | 2 mg/kg AD11787 | 1605 | Day 1 SQ Injection |
| 26 | 2 mg/kg AD11788 | 1635 | Day 1 SQ Injection |
| 27 | 2 mg/kg AD11789 | 1646 | Day 1 SQ Injection |
| 28 | 2 mg/kg AD11790 | 1648 | Day 1 SQ Injection |
| 29 | 2 mg/kg AD11791 | 1852 | Day 1 SQ Injection |
| 30 | 2 mg/kg AD11792 | 1897 | Day 1 SQ Injection |
| 31 | 2 mg/kg AD11793 | 1898 | Day 1 SQ Injection |
| 32 | 2 mg/kg AD11794 | 1955 | Day 1 SQ Injection |
| 33 | 2 mg/kg AD11795 | 1990 | Day 1 SQ Injection |

[0286] Serum was collected on Day −3, 1, 8, 15, 22, and 29. SEAP expression levels were determined pursuant to the procedure set forth in Example 2, above. Data from the experiment are shown in the following Table 9, with average SEAP reflecting the normalized average value of SEAP.

TABLE 9
Average SEAP normalized to pre-treatment and saline
control in hMARC1-SEAP mice of Example 3.

| | Day 8 | | Day 15 | | Day 22 | |
|---|---|---|---|---|---|---|
| | Avg | Std | Avg | Std | Avg | Std |
| Group ID | SEAP | Dev | SEAP | Dev | SEAP | Dev |
| 1. Isotonic Saline | 1.000 | 0.228 | 1.000 | 0.221 | 1.000 | 0.227 |
| 2. 2 mg/kg AD11764 | 1.417 | 0.470 | 1.331 | 0.425 | 1.557 | 0.467 |
| 3. 2 mg/kg AD11765 | 1.606 | 0.124 | 1.540 | 0.135 | 1.729 | 0.384 |
| 4. 2 mg/kg AD11766 | 1.007 | 0.134 | 1.098 | 0.186 | 1.389 | 0.087 |
| 5. 2 mg/kg AD11767 | 0.975 | 0.103 | 0.926 | 0.324 | 0.949 | 0.264 |
| 6. 2 mg/kg AD11768 | 1.091 | 0.310 | 1.007 | 0.302 | 1.168 | 0.314 |
| 7. 2 mg/kg AD11769 | 0.923 | 0.254 | 0.814 | 0.461 | 0.829 | 0.433 |
| 8. 2 mg/kg AD11770 | 0.992 | 0.022 | 0.984 | 0.158 | 0.989 | 0.085 |
| 9. 2 mg/kg AD11771 | 1.122 | 0.190 | 1.083 | 0.168 | 1.216 | 0.209 |
| 10. 2 mg/kg AD11772 | 1.047 | 0.152 | 0.881 | 0.333 | 0.785 | 0.357 |
| 11. 2 mg/kg AD11773 | 1.152 | 0.097 | 0.985 | 0.130 | 1.115 | 0.375 |
| 12. 2 mg/kg AD11774 | 0.824 | 0.241 | 0.815 | 0.374 | 0.844 | 0.526 |
| 13. 2 mg/kg AD11775 | 0.655 | 0.167 | 0.660 | 0.416 | 0.522 | 0.216 |
| 14. 2 mg/kg AD11776 | 0.959 | 0.247 | 0.862 | 0.273 | 1.087 | 0.408 |
| 15. 2 mg/kg AD11777 | 0.811 | 0.256 | 0.774 | 0.442 | 0.936 | 0.479 |
| 16. 2 mg/kg AD11778 | 0.542 | 0.122 | 0.474 | 0.261 | 0.354 | 0.243 |
| 17. 2 mg/kg AD11779 | 1.083 | 0.559 | 0.810 | 0.536 | 0.755 | 0.578 |
| 18. 2 mg/kg AD11780 | 0.998 | 0.310 | 0.910 | 0.465 | 0.973 | 0.511 |
| 19. 2 mg/kg AD11781 | 2.102 | 1.415 | 0.855 | 0.649 | 1.049 | 0.767 |
| 20. 2 mg/kg AD11782 | 1.156 | 0.379 | 0.464 | 0.215 | 0.486 | 0.222 |
| 21. 2 mg/kg AD11783 | 1.126 | 0.166 | 0.838 | 0.111 | 0.789 | 0.217 |
| 22. 2 mg/kg AD11784 | 0.973 | 0.209 | 0.774 | 0.306 | 0.696 | 0.379 |
| 23. 2 mg/kg AD11785 | 0.543 | 0.439 | 0.464 | 0.437 | 0.492 | 0.507 |
| 24. 2 mg/kg AD11786 | 0.730 | 0.369 | 0.458 | 0.308 | 0.433 | 0.253 |
| 25. 2 mg/kg AD11787 | 0.937 | 0.151 | 0.822 | 0.106 | 0.957 | 0.129 |
| 26. 2 mg/kg AD11788 | 1.015 | 0.215 | 0.683 | 0.168 | 0.721 | 0.149 |
| 27. 2 mg/kg AD11789 | 1.311 | 0.196 | 0.910 | 0.135 | 1.059 | 0.211 |
| 28. 2 mg/kg AD11790 | 1.100 | 0.207 | 0.825 | 0.210 | 1.073 | 0.366 |
| 29. 2 mg/kg AD11791 | 1.115 | 0.438 | 0.890 | 0.560 | 1.273 | 0.857 |
| 30. 2 mg/kg AD11792 | 0.946 | 0.201 | 0.876 | 0.120 | 1.020 | 0.252 |
| 31. 2 mg/kg AD11793 | 0.853 | 0.207 | 0.668 | 0.287 | 0.852 | 0.441 |
| 32. 2 mg/kg AD11794 | 1.095 | 0.357 | 0.785 | 0.323 | 0.997 | 0.513 |
| 33. 2 mg/kg AD11795 | 1.117 | 0.084 | 0.973 | 0.199 | 1.154 | 0.174 |

[0287] Groups 5, 7, 8, 12-16, 18, 22-25, 30, and 31 showed reduction in SEAP at Day 8. Groups 5, 7, 8, and 10-33 showed reduction in SEAP at Day 15. Groups 5, 7, 8, 10, 12, 13, 15-18, 20-26, 31, and 32 showed reduction in SEAP at Day 22.

### Example 4. In Vivo Administration of MARC1 RNAi Agents in hMARC1-SEAP Mice

[0288] The hMARC1-SEAP model described in Example 2, above, was used. On Day 1, four (n-4) female C57bl/6 albino mice were dosed with either saline or MARC1 RNAi agents formulated in saline (at 2 mg/kg, 4 mg/kg, or 6 mg/kg), via subcutaneous (SQ) injection, at 200 μL per 20 g (10 mL/kg) body weight injection volume. The dosing regimen is in accordance with Table 10 below.

TABLE 10
Dosing for mice of Example 4

| | | Targeted Position | |
|---|---|---|---|
| | Dose (RNAi | of MARC1 (Seq | |
| Group | Agent) | ID No. 1) | Dosing Route |
| 1 | Isotonic Saline | N/A | Day 1 SQ Injection |
| 2 | 6 mg/kg AD11778 | 1089 | Day 1 SQ Injection |
| 3 | 4 mg/kg AD11778 | 1089 | Day 1 SQ Injection |
| 4 | 2 mg/kg AD11778 | 1089 | Day 1 SQ Injection |
| 5 | 6 mg/kg AD11785 | 1310 | Day 1 SQ Injection |
| 6 | 4 mg/kg AD11785 | 1310 | Day 1 SQ Injection |
| 7 | 2 mg/kg AD11785 | 1310 | Day 1 SQ Injection |
| 8 | 6 mg/kg AD11786 | 1313 | Day 1 SQ Injection |
| 9 | 4 mg/kg AD11786 | 1313 | Day 1 SQ Injection |
| 10 | 2 mg/kg AD11786 | 1313 | Day 1 SQ Injection |
| 11 | 4 mg/kg AD11782 | 1190 | Day 1 SQ Injection |

[0289] Serum was collected on Day −5, 1, 8, 15, 22, and 29. SEAP expression levels were determined pursuant to the procedure set forth in Example 2, above. Data from the experiment are shown in the following Table 11, with average SEAP reflecting the normalized average value of SEAP.

TABLE 11
Average SEAP normalized to pre-treatment and saline
control in MARC1-SEAP mice of Example 4.

| | Day 8 | | Day 15 | | Day 22 | |
|---|---|---|---|---|---|---|
| | Avg | Std | Avg | Std | Avg | Std |
| Group ID | SEAP | Dev | SEAP | Dev | SEAP | Dev |
| 1. Isotonic Saline | 1.000 | 0.212 | 1.000 | 0.335 | 1.000 | 0.182 |
| 2. 6 mg/kg AD11778 | 0.241 | 0.054 | 0.107 | 0.018 | 0.075 | 0.025 |
| 3. 4 mg/kg AD11778 | 0.409 | 0.074 | 0.209 | 0.083 | 0.234 | 0.122 |
| 4. 2 mg/kg AD11778 | 0.425 | 0.084 | 0.207 | 0.058 | 0.228 | 0.089 |
| 5. 6 mg/kg AD11785 | 0.252 | 0.135 | 0.140 | 0.103 | 0.162 | 0.127 |
| 6. 4 mg/kg AD11785 | 0.418 | 0.098 | 0.214 | 0.115 | 0.249 | 0.219 |
| 7. 2 mg/kg AD11785 | 0.597 | 0.107 | 0.383 | 0.093 | 0.441 | 0.138 |
| 8. 6 mg/kg AD11786 | 0.272 | 0.109 | 0.164 | 0.152 | 0.187 | 0.220 |
| 9. 4 mg/kg AD11786 | 0.286 | 0.025 | 0.200 | 0.045 | 0.194 | 0.063 |
| 10. 2 mg/kg AD11786 | 0.433 | 0.118 | 0.371 | 0.139 | 0.377 | 0.164 |
| 11. 4 mg/kg AD11782 | 0.614 | 0.089 | 0.318 | 0.075 | 0.313 | 0.180 |

Day 29

| | Avg | Std |
|---|---|---|
| Group ID | SEAP | Dev |
| 1. Isotonic Saline | 1.000 | 0.250 |
| 2. 6 mg/kg AD11778 | 0.134 | 0.078 |
| 3. 4 mg/kg AD11778 | 0.419 | 0.345 |
| 4. 2 mg/kg AD11778 | 0.238 | 0.099 |
| 5. 6 mg/kg AD11785 | 0.218 | 0.113 |
| 6. 4 mg/kg AD11785 | 0.342 | 0.322 |
| 7. 2 mg/kg AD11785 | 0.505 | 0.131 |
| 8. 6 mg/kg AD11786 | 0.247 | 0.271 |
| 9. 4 mg/kg AD11786 | 0.273 | 0.082 |
| 10. 2 mg/kg AD11786 | 0.485 | 0.231 |
| 11. 4 mg/kg AD11782 | 0.369 | 0.128 |

[0290] Groups 2-11 showed reduction in SEAP at all time points.

### Example 5. In Vivo Administration of MARC1 RNAi Agents in hMARC1-SEAP Mice

[0291] The hMARC1-SEAP model described in Example 2, above, was used. On Day 1, four (n=4) female C57bl/6 albino mice were dosed with either saline or MARC1 RNAi agents formulated in saline (at 2 mg/kg), via subcutaneous (SQ) injection, at 200 μl per 20 g (10 mL/kg) body weight injection volume. The dosing regimen is in accordance with Table 12 below.

TABLE 12
Dosing for mice of Example 5

| | | Targeted Position | |
|---|---|---|---|
| | Dose (RNAi | of MARC1 (Seq | |
| Group | Agent) | ID No. 1) | Dosing Route |
| 1 | Isotonic Saline | N/A | Day 1 SQ Injection |
| 2 | 2 mg/kg AD12363 | 305 | Day 1 SQ Injection |
| 3 | 2 mg/kg AD12364 | 761 | Day 1 SQ Injection |
| 4 | 2 mg/kg AD12365 | 956 | Day 1 SQ Injection |
| 5 | 2 mg/kg AD12366 | 1109 | Day 1 SQ Injection |
| 6 | 2 mg/kg AD12367 | 1275 | Day 1 SQ Injection |
| 7 | 2 mg/kg AD12368 | 1633 | Day 1 SQ Injection |
| 8 | 2 mg/kg AD12369 | 1817 | Day 1 SQ Injection |
| 9 | 2 mg/kg AD12370 | 1900 | Day 1 SQ Injection |
| 10 | 2 mg/kg AD12371 | 1954 | Day 1 SQ Injection |
| 11 | 2 mg/kg AD12372 | 1633 | Day 1 SQ Injection |
| 12 | 2 mg/kg AD11786 | 1313 | Day 1 SQ Injection |

[0292] Serum was collected on Day −9. 1. 8. 15, and 22. SEAP expression levels were determined pursuant to the procedure set forth in Example 2, above. Data from the experiment are shown in the following Table 13, with average SEAP reflecting the normalized average value of SEAP.

TABLE 13
Average SEAP normalized to pre-treatment and saline
control in MARC1-SEAP mice of Example 5.

| | Day 8 | | Day 15 | | Day 22 | |
|---|---|---|---|---|---|---|
| | Avg | Std | Avg | Std | Avg | Std |
| Group ID | SEAP | Dev | SEAP | Dev | SEAP | Dev |
| 1. Isotonic Saline | 1.000 | 0.087 | 1.000 | 0.302 | 1.000 | 0.299 |
| 2. 2 mg/kg AD12363 | 0.778 | 0.196 | 0.551 | 0.180 | 0.703 | 0.219 |
| 3. 2 mg/kg AD12364 | 0.887 | 0.032 | 0.661 | 0.191 | 0.878 | 0.402 |
| 4. 2 mg/kg AD12365 | 0.918 | 0.246 | 0.723 | 0.224 | 0.801 | 0.231 |
| 5. 2 mg/kg AD12366 | 0.732 | 0.198 | 0.598 | 0.258 | 0.601 | 0.142 |
| 6. 2 mg/kg AD12367 | 0.622 | 0.133 | 0.374 | 0.074 | 0.517 | 0.182 |
| 7. 2 mg/kg AD12368 | 0.800 | 0.096 | 0.529 | 0.047 | 0.713 | 0.185 |
| 8. 2 mg/kg AD12369 | 0.970 | 0.262 | 0.835 | 0.111 | 0.887 | 0.171 |
| 9. 2 mg/kg AD12370 | 0.747 | 0.215 | 0.508 | 0.251 | 0.634 | 0.225 |
| 10. 2 mg/kg AD12371 | 0.639 | 0.150 | 0.355 | 0.193 | 0.704 | 0.161 |
| 11. 2 mg/kg AD12372 | 0.813 | 0.209 | 0.704 | 0.184 | 0.764 | 0.249 |
| 12. 2 mg/kg AD11786 | 0.393 | 0.051 | 0.582 | 0.114 | 0.327 | 0.099 |

[0293] Groups 2-12 showed reduction in SEAP at all time points.

### Example 6. In Vivo Administration of MARC1 RNAi Agents in hMARC1-SEAP Mice

[0294] The hMARC1-SEAP model described in Example 2, above, was used. On Day 1, four (n-4) female C57bl/6 albino mice were dosed with either saline or MARC1 RNAi agents formulated in saline (at 2 mg/kg), via subcutaneous (SQ) injection, at 200 μL per 20 g (10 mL/kg) body weight injection volume. The dosing regimen is in accordance with Table 14 below.

TABLE 14
Dosing for mice of Example 6

| | | Targeted Position | |
|---|---|---|---|
| | Dose (RNAi | of MARC1 (Seq | |
| Group | Agent) | ID No. 1) | Dosing Route |
| 1 | Isotonic Saline | N/A | Day 1 SQ Injection |
| 2 | 2 mg/kg AD11786 | 1313 | Day 1 SQ Injection |
| 3 | 2 mg/kg AD12291 | 1313 | Day 1 SQ Injection |
| 4 | 2 mg/kg AD12292 | 1313 | Day 1 SQ Injection |
| 5 | 2 mg/kg AD12972 | 1313 | Day 1 SQ Injection |
| 6 | 2 mg/kg AD12973 | 1313 | Day 1 SQ Injection |
| 7 | 2 mg/kg AD12974 | 1313 | Day 1 SQ Injection |
| 8 | 2 mg/kg AD12975 | 1313 | Day 1 SQ Injection |
| 9 | 2 mg/kg AD12976 | 1313 | Day 1 SQ Injection |
| 10 | 2 mg/kg AD12591 | 901 | Day 1 SQ Injection |

[0295] Serum was collected on Day −14,−7, 1, 8, 15, 22, and 29. SEAP expression levels were determined pursuant to the procedure set forth in Example 2, above. Data from the experiment are shown in the following Table 15, with average SEAP reflecting the normalized average value of SEAP.

TABLE 15
Average SEAP normalized to pre-treatment and saline
control in MARC1-SEAP mice of Example 6.

| | Day 8 | | Day 15 | | Day 22 | |
|---|---|---|---|---|---|---|
| | Avg | Std | Avg | Std | Avg | Std |
| Group ID | SEAP | Dev | SEAP | Dev | SEAP | Dev |
| 1. Isotonic Saline | 1.000 | 0.152 | 1.000 | 0.188 | 1.000 | 0.334 |
| 2. 2 mg/kg AD11786 | 0.591 | 0.085 | 0.475 | 0.152 | 0.395 | 0.171 |
| 3. 2 mg/kg AD12291 | 0.625 | 0.041 | 0.392 | 0.094 | 0.387 | 0.231 |
| 4. 2 mg/kg AD12292 | 0.823 | 0.079 | 0.614 | 0.094 | 0.433 | 0.077 |
| 5. 2 mg/kg AD12972 | 0.703 | 0.140 | 0.584 | 0.220 | 0.548 | 0.229 |
| 6. 2 mg/kg AD12973 | 0.627 | 0.109 | 0.376 | 0.052 | 0.275 | 0.045 |
| 7. 2 mg/kg AD12974 | 0.633 | 0.037 | 0.493 | 0.145 | 0.446 | 0.152 |
| 8. 2 mg/kg AD12975 | 0.573 | 0.057 | 0.409 | 0.141 | 0.303 | 0.134 |
| 9. 2 mg/kg AD12976 | 0.493 | 0.095 | 0.341 | 0.100 | 0.283 | 0.121 |
| 10. 2 mg/kg AD12591 | 0.849 | 0.131 | 0.776 | 0.184 | 0.514 | 0.078 |

Day 29

| | Avg | Std |
|---|---|---|
| Group ID | SEAP | Dev |
| 1. Isotonic Saline | 1.000 | 0.214 |
| 2. 2 mg/kg AD11786 | 0.508 | 0.160 |
| 3. 2 mg/kg AD12291 | 0.444 | 0.333 |
| 4. 2 mg/kg AD12292 | 0.657 | 0.135 |
| 5. 2 mg/kg AD12972 | 0.567 | 0.258 |
| 6. 2 mg/kg AD12973 | 0.337 | 0.065 |
| 7. 2 mg/kg AD12974 | 0.525 | 0.185 |
| 8. 2 mg/kg AD12975 | 0.382 | 0.210 |
| 9. 2 mg/kg AD12976 | 0.351 | 0.152 |
| 10. 2 mg/kg AD12591 | 0.658 | 0.163 |

[0296] Groups 2-10 showed reduction in SEAP at all time points.

### Example 7. In Vivo Administration of MARC1 RNAI Agents in hMARC1-SEAP Mice

[0297] The hMARC1-SEAP model described in Example 2, above, was used. On Day 1, four (n=4) female C57bl/6 albino mice were dosed with either saline or MARC1 RNAi agents formulated in saline (at 2 mg/kg), via subcutaneous (SQ) injection, at 200 μL per 20 g (10 mL/kg) body weight injection volume. The dosing regimen is in accordance with Table 16 below.

TABLE 16
Dosing for mice of Example 7

| | | Targeted Position | |
|---|---|---|---|
| | Dose (RNAi | of MARC1 (Seq | |
| Group | Agent) | ID No. 1) | Dosing Route |
| 1 | Isotonic Saline | N/A | Day 1 SQ Injection |
| 2 | 2 mg/kg AD11786 | 1313 | Day 1 SQ Injection |
| 3 | 2 mg/kg AD12367 | 1275 | Day 1 SQ Injection |
| 4 | 2 mg/kg AD13113 | 1275 | Day 1 SQ Injection |
| 5 | 2 mg/kg AD13114 | 1275 | Day 1 SQ Injection |
| 6 | 2 mg/kg AD13115 | 1275 | Day 1 SQ Injection |
| 7 | 2 mg/kg AD13116 | 1275 | Day 1 SQ Injection |
| 8 | 2 mg/kg AD13117 | 1275 | Day 1 SQ Injection |
| 9 | 2 mg/kg AD12371 | 1954 | Day 1 SQ Injection |
| 10 | 2 mg/kg AD13118 | 1954 | Day 1 SQ Injection |
| 11 | 2 mg/kg AD13119 | 1954 | Day 1 SQ Injection |
| 12 | 2 mg/kg AD12596 | 1014 | Day 1 SQ Injection |

[0298] Serum was collected on Day −14.−7, 1, 8, 15, 22, and 29. SEAP expression levels were determined pursuant to the procedure set forth in Example 2, above. Data from the experiment are shown in the following Table 17, with average SEAP reflecting the normalized average value of SEAP.

TABLE 17
Average SEAP normalized to pre-treatment and saline
control in MARC1-SEAP mice of Example 7.

| | Day 8 | | Day 15 | | Day 22 | |
|---|---|---|---|---|---|---|
| | Avg | Std | Avg | Std | Avg | Std |
| Group ID | SEAP | Dev | SEAP | Dev | SEAP | Dev |
| 1. Isotonic Saline | 1.000 | 0.182 | 1.000 | 0.322 | 1.000 | 0.373 |
| 2. 2 mg/kg AD11786 | 0.881 | 0.210 | 0.875 | 0.558 | 0.711 | 0.598 |
| 3. 2 mg/kg AD12367 | 1.103 | 0.095 | 1.260 | 0.308 | 1.241 | 0.481 |
| 4. 2 mg/kg AD13113 | 0.906 | 0.248 | 1.020 | 0.408 | 0.896 | 0.401 |
| 5. 2 mg/kg AD13114 | 0.936 | 0.138 | 0.947 | 0.447 | 0.714 | 0.307 |
| 6. 2 mg/kg AD13115 | 1.026 | 0.118 | 1.175 | 0.157 | 1.033 | 0.151 |
| 7. 2 mg/kg AD13116 | 0.890 | 0.032 | 0.886 | 0.214 | 0.767 | 0.170 |
| 8. 2 mg/kg AD13117 | 0.645 | 0.155 | 0.626 | 0.310 | 0.616 | 0.428 |
| 9. 2 mg/kg AD12371 | 1.381 | 0.131 | 1.744 | 0.574 | 1.492 | 0.524 |
| 10. 2 mg/kg AD13118 | 1.083 | 0.374 | 1.026 | 0.328 | 1.010 | 0.300 |
| 11. 2 mg/kg AD13119 | 1.311 | 0.128 | 1.592 | 0.111 | 1.469 | 0.141 |
| 12. 2 mg/kg AD12596 | 1.260 | 0.273 | 1.562 | 0.242 | 1.399 | 0.352 |

[0299] Groups 2, 4, 5, 7, and 8 showed reduction in SEAP at Day 8. Groups 2, 5, 7, and 8 showed reduction in SEAP at Day 15. Groups 2, 4, 5, 7, and 8 showed reduction in SEAP at Day 22.

### Example 8. In Vivo Administration of MARC1 RNAi Agents in hMARC1-SEAP Mice

[0300] The hMARC1-SEAP model described in Example 2, above, was used. On Day 1, four (n=4) female C57bl/6 albino mice were dosed with either saline or MARC1 RNAi agents formulated in saline (at 2 mg/kg), via subcutaneous (SQ) injection, at 200 μL per 20 g (10 mL/kg) body weight injection volume. The dosing regimen is in accordance with Table 18 below.

TABLE 18
Dosing for mice of Example 8

| | | Targeted Position | |
|---|---|---|---|
| | Dose (RNAi | of MARC1 (Seq ID | |
| Group | Agent) | No. 1) | Dosing Route |
| 1 | Isotonic Saline | N/A | Day 1 SQ Injection |
| 2 | 2 mg/kg AD11786 | 1313 | Day 1 SQ Injection |
| 3 | 2 mg/kg AD12976 | 1313 | Day 1 SQ Injection |
| 4 | 2 mg/kg AD13322 | 419 | Day 1 SQ Injection |
| 5 | 2 mg/kg AD13323 | 601 | Day 1 SQ Injection |
| 6 | 2 mg/kg AD13324 | 1124 | Day 1 SQ Injection |
| 7 | 2 mg/kg AD13325 | 1131 | Day 1 SQ Injection |
| 8 | 2 mg/kg AD13326 | 1157 | Day 1 SQ Injection |
| 9 | 2 mg/kg AD13327 | 1246 | Day 1 SQ Injection |
| 10 | 2 mg/kg AD13328 | 1332 | Day 1 SQ Injection |
| 11 | 2 mg/kg AD13329 | 1432 | Day 1 SQ Injection |
| 12 | 2 mg/kg AD13330 | 1842 | Day 1 SQ Injection |

[0301] Serum was collected on Day −14,−7, 1, 8, 15, 22, and 29. SEAP expression levels were determined pursuant to the procedure set forth in Example 2, above. Data from the experiment are shown in the following Table 19, with average SEAP reflecting the normalized average value of SEAP.

TABLE 19
Average SEAP normalized to pre-treatment and saline
control in MARC1-SEAP mice of Example 8.

| | Day 8 | | Day 15 | | Day 22 | |
|---|---|---|---|---|---|---|
| | Avg | Std | Avg | Std | Avg | Std |
| Group ID | SEAP | Dev | SEAP | Dev | SEAP | Dev |
| 1. Isotonic Saline | 1.000 | 0.221 | 1.000 | 0.421 | 1.000 | 0.323 |
| 2. 2 mg/kg AD11786 | 0.529 | 0.035 | 0.451 | 0.111 | 0.429 | 0.144 |
| 3. 2 mg/kg AD12976 | 0.334 | 0.107 | 0.231 | 0.129 | 0.246 | 0.193 |
| 4. 2 mg/kg AD13322 | 0.568 | 0.158 | 0.824 | 0.913 | 0.625 | 0.293 |
| 5. 2 mg/kg AD13323 | 0.918 | 0.141 | 0.722 | 0.189 | 0.758 | 0.237 |
| 6. 2 mg/kg AD13324 | 0.599 | 0.123 | 0.506 | 0.079 | 0.566 | 0.149 |
| 7. 2 mg/kg AD13325 | 0.488 | 0.110 | 0.510 | 0.212 | 0.598 | 0.200 |
| 8. 2 mg/kg AD13326 | 0.660 | 0.171 | 0.796 | 0.196 | 0.624 | 0.071 |
| 9. 2 mg/kg AD13327 | 0.701 | 0.092 | 0.592 | 0.271 | 0.948 | 0.568 |
| 10. 2 mg/kg AD13328 | 0.785 | 0.155 | 0.612 | 0.128 | 0.548 | 0.224 |
| 11. 2 mg/kg AD13329 | 0.570 | 0.066 | 0.542 | 0.138 | 0.584 | 0.180 |
| 12. 2 mg/kg AD13330 | 0.552 | 0.117 | 0.588 | 0.089 | 0.520 | 0.092 |

[0302] Groups 2-12 showed reduction in SEAP at all time points.

### Example 9. In Vivo Administration of MARC1 RNAi Agents in hMARC1-SEAP Mice

[0303] The hMARC1-SEAP model described in Example 2, above, was used. On Day 1, four (n=4) female C57bl/6 albino mice were dosed with either saline or MARC1 RNAi agents formulated in saline (at 2 mg/kg), via subcutaneous (SQ) injection, at 200 μL per 20 g (10 mL/kg) body weight injection volume. The dosing regimen is in accordance with Table 20 below

TABLE 20
Dosing for mice of Example 9

| | | Targeted Position | |
|---|---|---|---|
| | Dose (RNAi | of MARC1 (Seq ID | |
| Group | Agent) | No. 1) | Dosing Route |
| 1 | Isotonic Saline | N/A | Day 1 SQ Injection |
| 2 | 2 mg/kg AD12976 | 1313 | Day 1 SQ Injection |
| 3 | 2 mg/kg AD13535 | 1059 | Day 1 SQ Injection |
| 4 | 2 mg/kg AD13536 | 1058 | Day 1 SQ Injection |
| 5 | 2 mg/kg AD13537 | 1060 | Day 1 SQ Injection |
| 6 | 2 mg/kg AD12982 | 1089 | Day 1 SQ Injection |
| 7 | 2 mg/kg AD13117 | 1275 | Day 1 SQ Injection |
| 8 | 2 mg/kg AD12960 | 1817 | Day 1 SQ Injection |
| 9 | 2 mg/kg AD12287 | 1190 | Day 1 SQ Injection |
| 10 | 2 mg/kg AD12289 | 1310 | Day 1 SQ Injection |

[0304] Serum was collected on Day −7, 1, 8, 15, and 22. SEAP expression levels were determined pursuant to the procedure set forth in Example 2, above. Data from the experiment are shown in the following Table 21, with average SEAP reflecting the normalized average value of SEAP.

TABLE 21
Average SEAP normalized to pre-treatment and saline
control in MARC1-SEAP mice of Example 9.

| | Day 8 | | Day 15 | | Day 22 | |
|---|---|---|---|---|---|---|
| | Avg | Std | Avg | Std | Avg | Std |
| Group ID | SEAP | Dev | SEAP | Dev | SEAP | Dev |
| 1. Isotonic Saline | 1.000 | 0.134 | 1.000 | 0.296 | 1.000 | 0.476 |
| 2. 2 mg/kg AD12976 | 0.507 | 0.120 | 0.266 | 0.147 | 0.261 | 0.186 |
| 3. 2 mg/kg AD13535 | 0.976 | 0.234 | 0.790 | 0.311 | 0.797 | 0.396 |
| 4. 2 mg/kg AD13536 | 0.731 | 0.242 | 0.535 | 0.222 | 0.591 | 0.238 |
| 5. 2 mg/kg AD13537 | 0.372 | 0.104 | 0.229 | 0.092 | 0.208 | 0.062 |
| 6. 2 mg/kg AD12982 | 0.487 | 0.051 | 0.234 | 0.062 | 0.164 | 0.046 |
| 7. 2 mg/kg AD13117 | 0.482 | 0.198 | 0.290 | 0.178 | 0.349 | 0.290 |
| 8. 2 mg/kg AD12960 | 0.803 | 0.123 | 0.673 | 0.047 | 0.655 | 0.128 |
| 9. 2 mg/kg AD12287 | 0.535 | 0.096 | 0.307 | 0.095 | 0.256 | 0.108 |
| 10. 2 mg/kg AD12289 | 0.727 | 0.087 | 0.320 | 0.097 | 0.310 | 0.074 |

[0305] Groups 2-10 showed reduction in SEAP at all time points.

### Example 10. In Vivo Administration of MARC1 RNAi Agents in hMARC1-SEAP Mice

[0306] The hMARC1-SEAP model described in Example 2, above, was used. On Day 1, four (n=4) female C57bl/6 albino mice were dosed with either saline or MARC1 RNAi agents formulated in saline (at 2 mg/kg), via subcutaneous (SQ) injection, at 200 μL per 20 g (10 mL/kg) body weight injection volume. The dosing regimen is in accordance with Table 22 below.

TABLE 22
Dosing for mice of Example 10

| | | Targeted Position | |
|---|---|---|---|
| | Dose (RNAi | of MARC1 (Seq ID | |
| Group | Agent) | No. 1) | Dosing Route |
| 1 | Isotonic Saline | N/A | Day 1 SQ Injection |
| 2 | 2 mg/kg AD11778 | 1089 | Day 1 SQ Injection |
| 3 | 2 mg/kg AD12982 | 1089 | Day 1 SQ Injection |
| 4 | 2 mg/kg AD13705 | 1089 | Day 1 SQ Injection |
| 5 | 2 mg/kg AD13706 | 1089 | Day 1 SQ Injection |
| 6 | 2 mg/kg AD13707 | 1089 | Day 1 SQ Injection |
| 7 | 2 mg/kg AD12634 | 1931 | Day 1 SQ Injection |
| 8 | 2 mg/kg AD13708 | 1931 | Day 1 SQ Injection |
| 9 | 2 mg/kg AD13709 | 1931 | Day 1 SQ Injection |
| 10 | 2 mg/kg AD13710 | 1931 | Day 1 SQ Injection |
| 11 | 2 mg/kg AD13711 | 1931 | Day 1 SQ Injection |
| 12 | 2 mg/kg AD13712 | 1931 | Day 1 SQ Injection |

[0307] Serum was collected on Day −7, 1, 8, 15, and 22. SEAP expression levels were determined pursuant to the procedure set forth in Example 2, above. Data from the experiment are shown in the following Table 23, with average SEAP reflecting the normalized average value of SEAP.

TABLE 23
Average SEAP normalized to pre-treatment and saline
control in MARC1-SEAP mice of Example 10.

| | Day 8 | | Day 15 | | Day 22 | |
|---|---|---|---|---|---|---|
| | Avg | Std | Avg | Std | Avg | Std |
| Group ID | SEAP | Dev | SEAP | Dev | SEAP | Dev |
| 1. Isotonic Saline | 1.000 | 0.312 | 1.000 | 0.306 | 1.000 | 0.169 |
| 2. 2 mg/kg AD11778 | 0.510 | 0.109 | 0.348 | 0.057 | 0.619 | 0.266 |
| 3. 2 mg/kg AD12982 | 0.407 | 0.090 | 0.237 | 0.068 | 0.272 | 0.162 |
| 4. 2 mg/kg AD13705 | 0.485 | 0.027 | 0.260 | 0.057 | 0.316 | 0.104 |
| 5. 2 mg/kg AD13706 | 0.457 | 0.159 | 0.219 | 0.141 | 0.299 | 0.221 |
| 6. 2 mg/kg AD13707 | 0.597 | 0.038 | 0.368 | 0.094 | 0.452 | 0.186 |
| 7. 2 mg/kg AD12634 | 0.632 | 0.069 | 0.665 | 0.277 | 0.772 | 0.438 |
| 8. 2 mg/kg AD13708 | 0.566 | 0.094 | 0.461 | 0.089 | 0.614 | 0.155 |
| 9. 2 mg/kg AD13709 | 0.562 | 0.044 | 0.306 | 0.131 | 0.373 | 0.226 |
| 10. 2 mg/kg AD13710 | 0.415 | 0.131 | 0.259 | 0.194 | 0.323 | 0.184 |
| 11. 2 mg/kg AD13711 | 0.556 | 0.112 | 0.506 | 0.155 | 0.467 | 0.128 |
| 12. 2 mg/kg AD13712 | 0.391 | 0.108 | 0.325 | 0.154 | 0.262 | 0.065 |

[0308] Groups 2-12 showed reduction in SEAP at all time points.

### Example 11. In Vivo Administration of MARC1 RNAi Agents in hMARC1-SEAP Mice

[0309] The hMARC1-SEAP model described in Example 2, above, was used. On Day 1, four (n=4) female C57bl/6 albino mice were dosed with either saline or RNAi agents formulated in saline (at 2 mg/kg), via subcutaneous (SQ) injection, at 200 μL per 20 g (10 mL/kg) body weight injection volume. The dosing regimen is in accordance with Table 24 below.

TABLE 24
Dosing for mice of Example 11

| | | Targeted Position | |
|---|---|---|---|
| | Dose (RNAi | of MARC1 (Seq ID | |
| Group | Agent) | No. 1) | Dosing Route |
| 1 | Isotonic Saline | N/A | Day 1 SQ Injection |
| 2 | 2 mg/kg AD11786 | 1313 | Day 1 SQ Injection |
| 3 | 2 mg/kg AD12976 | 1313 | Day 1 SQ Injection |
| 4 | 2 mg/kg AD12367 | 1275 | Day 1 SQ Injection |
| 5 | 2 mg/kg AD13117 | 1275 | Day 1 SQ Injection |
| 6 | 2 mg/kg AD13508 | 1275 | Day 1 SQ Injection |
| 7 | 2 mg/kg AD13511 | 1275 | Day 1 SQ Injection |
| 8 | 2 mg/kg AD13510 | 1275 | Day 1 SQ Injection |
| 9 | 2 mg/kg AD13514 | 1275 | Day 1 SQ Injection |
| 10 | 2 mg/kg AD13804 | 1275 | Day 1 SQ Injection |
| 11 | 2 mg/kg AD13805 | 1275 | Day 1 SQ Injection |
| 12 | 2 mg/kg AD13806 | 1275 | Day 1 SQ Injection |

[0310] Serum was collected on Day −7, 1, 8, 15, and 22. SEAP expression levels were determined pursuant to the procedure set forth in Example 2, above. Data from the experiment are shown in the following Table 25, with average SEAP reflecting the normalized average value of SEAP.

TABLE 25
Average SEAP normalized to pre-treatment and saline
control in MARC1-SEAP mice of Example 11.

| | Day 8 | | Day 15 | | Day 22 | |
|---|---|---|---|---|---|---|
| | Avg | Std | Avg | Std | Avg | Std |
| Group ID | SEAP | Dev | SEAP | Dev | SEAP | Dev |
| 1. Isotonic Saline | 1.000 | 0.316 | 1.000 | 0.380 | 1.000 | 0.370 |
| 2. 2 mg/kg AD11786 | 0.911 | 0.235 | 0.635 | 0.357 | 0.691 | 0.471 |
| 3. 2 mg/kg AD12976 | 0.638 | 0.207 | 0.426 | 0.168 | 0.481 | 0.267 |
| 4. 2 mg/kg AD12367 | 0.844 | 0.239 | 0.714 | 0.297 | 0.799 | 0.349 |
| 5. 2 mg/kg AD13117 | 0.801 | 0.325 | 0.662 | 0.439 | 0.651 | 0.417 |
| 6. 2 mg/kg AD13508 | 0.829 | 0.232 | 0.551 | 0.145 | 0.595 | 0.161 |
| 7. 2 mg/kg AD13511 | 0.736 | 0.197 | 0.607 | 0.232 | 0.672 | 0.404 |
| 8. 2 mg/kg AD13510 | 0.750 | 0.040 | 0.558 | 0.100 | 0.477 | 0.067 |
| 9. 2 mg/kg AD13514 | 0.486 | 0.124 | 0.354 | 0.203 | 0.358 | 0.236 |
| 10. 2 mg/kg AD13804 | 0.596 | 0.052 | 0.472 | 0.051 | 0.414 | 0.290 |
| 11. 2 mg/kg AD13805 | 0.496 | 0.120 | 0.339 | 0.116 | 0.355 | 0.125 |
| 12. 2 mg/kg AD13806 | 0.670 | 0.126 | 0.465 | 0.124 | 0.472 | 0.079 |

[0311] Groups 2-12 showed reduction in SEAP at all time points.

### Example 12. In Vivo Administration of MARC1 RNAI Agents in hMARC1-SEAP Mice

[0312] The hMARC1-SEAP model described in Example 2, above, was used. On Day 1, four (n-4) female C57bl/6 albino mice were dosed with either saline or RNAi agents formulated in saline (at 2 mg/kg), via subcutaneous (SQ) injection, at 200 μL per 20 g (10 mL/kg) body weight injection volume. The dosing regimen is in accordance with Table 26 below.

TABLE 26
Dosing for mice of Example 12

| | | Targeted Position | |
|---|---|---|---|
| | Dose (RNAi | of MARC1 (Seq ID | |
| Group | Agent) | No. 1) | Dosing Route |
| 1 | Isotonic Saline | N/A | Day 1 SQ Injection |
| 2 | 2 mg/kg AD12976 | 1313 | Day 1 SQ Injection |
| 3 | 2 mg/kg AD12960 | 1817 | Day 1 SQ Injection |
| 4 | 2 mg/kg AD13447 | 1817 | Day 1 SQ Injection |
| 5 | 2 mg/kg AD13117 | 1275 | Day 1 SQ Injection |
| 6 | 2 mg/kg AD12287 | 1190 | Day 1 SQ Injection |
| 7 | 2 mg/kg AD13923 | 1190 | Day 1 SQ Injection |
| 8 | 2 mg/kg AD13924 | 1190 | Day 1 SQ Injection |
| 9 | 2 mg/kg AD13925 | 1190 | Day 1 SQ Injection |
| 10 | 2 mg/kg AD13926 | 1190 | Day 1 SQ Injection |

[0313] Serum was collected on Day −7, 1, 8, 15, and 22. SEAP expression levels were determined pursuant to the procedure set forth in Example 2, above. Data from the experiment are shown in the following Table 27, with average SEAP reflecting the normalized average value of SEAP.

TABLE 27
Average SEAP normalized to pre-treatment and saline
control in MARC1-SEAP mice of Example 12.

| | Day 8 | | Day 15 | | Day 22 | |
|---|---|---|---|---|---|---|
| | Avg | Std | Avg | Std | Avg | Std |
| Group ID | SEAP | Dev | SEAP | Dev | SEAP | Dev |
| 1. Isotonic Saline | 1.000 | 0.296 | 1.000 | 0.225 | 1.000 | 0.163 |
| 2. 2 mg/kg AD12976 | 0.514 | 0.058 | 0.577 | 0.079 | 0.247 | 0.108 |
| 3. 2 mg/kg AD12960 | 0.560 | 0.049 | 0.645 | 0.122 | 0.269 | 0.108 |
| 4. 2 mg/kg AD13447 | 0.495 | 0.098 | 0.582 | 0.175 | 0.287 | 0.054 |
| 5. 2 mg/kg AD13117 | 0.442 | 0.068 | 0.530 | 0.094 | 0.191 | 0.080 |
| 6. 2 mg/kg AD12287 | 0.703 | 0.062 | 0.817 | 0.081 | 0.268 | 0.056 |
| 7. 2 mg/kg AD13923 | 0.641 | 0.210 | 0.780 | 0.229 | 0.360 | 0.283 |
| 8. 2 mg/kg AD13924 | 0.628 | 0.092 | 0.739 | 0.106 | 0.418 | 0.068 |
| 9. 2 mg/kg AD13925 | 0.566 | 0.282 | 0.555 | 0.142 | 0.243 | 0.077 |
| 10. 2 mg/kg AD13926 | 0.513 | 0.061 | 0.664 | 0.078 | 0.341 | 0.086 |

[0314] Groups 2-10 showed reduction in SEAP at all time points.

### Example 13. In Vivo Administration of MARC1 RNAi Agents in hMARC1-SEAP Mice

[0315] The hMARC1-SEAP model described in Example 2, above, was used. On Day 1, four (n-4) female C57bl/6 albino mice were dosed with either saline or RNAi agents formulated in saline (at 2 mg/kg), via subcutaneous (SQ) injection, at 250 uL per 25 g body weight injection volume. The dosing regimen is in accordance with Table 28 below.

TABLE 28
Dosing for mice of Example 13

| | | Targeted Position | |
|---|---|---|---|
| | Dose (RNAi | of MARC1 (Seq ID | |
| Group | Agent) | No. 1) | Dosing Route |
| 1 | Isotonic Saline | N/A | Day 1 SQ Injection |
| 2 | 2 mg/kg AD11786 | 1313 | Day 1 SQ Injection |
| 3 | 2 mg/kg AD12976 | 1313 | Day 1 SQ Injection |
| 4 | 2 mg/kg AD12369 | 1817 | Day 1 SQ Injection |
| 5 | 2 mg/kg AD13447 | 1817 | Day 1 SQ Injection |
| 6 | 2 mg/kg AD12367 | 1275 | Day 1 SQ Injection |
| 7 | 2 mg/kg AD13805 | 1275 | Day 1 SQ Injection |
| 8 | 2 mg/kg AD11782 | 1190 | Day 1 SQ Injection |
| 9 | 2 mg/kg AD13925 | 1190 | Day 1 SQ Injection |

[0316] Serum was collected on Day −7, 1, 8, 15, and 22. SEAP expression levels were determined pursuant to the procedure set forth in Example 2, above. Data from the experiment are shown in the following Table 29, with average SEAP reflecting the normalized average value of SEAP.

TABLE 29
Average SEAP normalized to pre-treatment and saline
control in MARC1-SEAP mice of Example 13.

| | Day 8 | | Day 15 | | Day 22 | |
|---|---|---|---|---|---|---|
| | Avg | Std | Avg | Std | Avg | Std |
| Group ID | SEAP | Dev | SEAP | Dev | SEAP | Dev |
| 1. Isotonic Saline | 1.000 | 0.673 | 1.000 | 0.779 | 1.000 | 0.998 |
| 2. 2 mg/kg AD11786 | 0.745 | 0.349 | 0.433 | 0.195 | 0.405 | 0.122 |
| 3. 2 mg/kg AD12976 | 0.499 | 0.057 | 0.391 | 0.083 | 0.323 | 0.138 |
| 4. 2 mg/kg AD12369 | 0.837 | 0.105 | 0.704 | 0.127 | 0.906 | 0.175 |
| 5. 2 mg/kg AD13447 | 0.887 | 0.070 | 0.983 | 0.144 | 1.081 | 0.187 |
| 6. 2 mg/kg AD12367 | 0.825 | 0.148 | 0.565 | 0.145 | 0.659 | 0.113 |
| 7. 2 mg/kg AD13805 | 0.474 | 0.085 | 0.237 | 0.048 | 0.317 | 0.091 |
| 8. 2 mg/kg AD11782 | 0.666 | 0.111 | 0.571 | 0.022 | 0.618 | 0.228 |
| 9. 2 mg/kg AD13925 | 0.518 | 0.113 | 0.430 | 0.166 | 0.564 | 0.169 |

[0317] Groups 2-9 showed reduction in SEAP at Day 8 and Day 15. Groups 2-4 and 6-9 showed reduction in SEAP at Day 22.

### Example 14. MARC1-GLuc AAV Mouse Model

[0318] To evaluate certain MARC1 RNAi agents. a MARC1-GLuc (Gaussia Luciferase) AAV (Adeno-associated virus) mouse model was used. Six to eight-week-old male C57BL/6 mice were transduced with MARC1-GLuc AAV serotype 8, administered at least 14 days prior to administration of an MARC1 RNAi agent or control. The genome of the MARC1-GLuc AAV contains the 33-2500 region of the human MARC1 cDNA sequence (GenBank NM_022746.4 (SEQ ID NO:1)) inserted into the 3′ UTR of the GLuc reporter gene sequence. 5E12 to 1E13 GC/kg of the respective virus in PBS in a total volume of 250 uL per 25 g of animal's body weight was injected into mice via the tail vein to create MARC1-GLuc AAV model mice. Inhibition of expression of MARC1 by MARC1 RNAi agents result in concomitant inhibition of GLuc expression, which is measured. Prior to administration of a treatment (between day −7 and day 1 pre-dose). GLuc expression levels in serum were measured by the Pierce™ Gaussia Luciferase Glow Assay Kit (Thermo Fisher Scientific. Catalog #16161), and the mice were grouped according to average GLuc levels.

[0319] Mice were anesthetized with 2-3% isoflurane and blood samples were collected from the submandibular area into serum separation tubes (Sarstedt AG & Co., Nümbrecht. Germany). Blood was allowed to coagulate at ambient temperature for 20 min. The tubes were centrifuged at 8.000 xg for 3 min to separate the serum and stored at 4° C. Serum was collected and measured by the Pierce™ Gaussia Luciferase Glow Assay Kit according to the manufacturer's instructions. Serum GLuc levels for each animal can be normalized to the control group of mice injected with vehicle control in order to account for the non-treatment related shift in MARC1 expression with this model. To do so. first. the GLuc level for each animal at a time point was divided by the pre-treatment level of expression in that animal (Day 1) in order to determine the ratio of expression “normalized to pre-treatment”. Expression at a specific time point was then normalized to the control group by dividing the “normalized to pre-treatment” ratio for an individual animal by the average “normalized to pre-treatment” ratio of all mice in the normal vehicle control group. Alternatively, the serum GLuc levels for each animal was assessed by normalizing to pre-treatment levels only.

### Example 15. In Vivo Testing of MARC1 RNAi Agents in MARC1-GLuc AAV Mice

[0320] The MARC1-GLUC AAV mouse model described in Example 14, above, using the MARC1-GLuc AAV containing the 33-2500 region of the human MARC1 cDNA sequence was used. On Day 1, four (n=4) male C57bl/6 mice were dosed with either saline or RNAi agents formulated in saline (at 2 mg/kg), via subcutaneous (SQ) injection, at 250 uL per 25 g body weight injection volume. The injections were performed between the skin and muscle (i.e. subcutaneous injections). The dosing regimen is in accordance with Table 30 below.

TABLE 30
Dosing for mice of Example 15

| | | Targeted | |
|---|---|---|---|
| | | Position | |
| | Dose (RNAi | (Seq ID | |
| Group | Agent) | No. 1) | Dosing Regimen |
| 1 | Saline | N/A | Single SQ injection on day 1 |
| 2 | 2 mg/kg AD12363 | 305 | Single SQ injection on day 1 |
| 3 | 2 mg/kg AD12364 | 761 | Single SQ injection on day 1 |
| 4 | 2 mg/kg AD12365 | 956 | Single SQ injection on day 1 |
| 5 | 2 mg/kg AD12366 | 1109 | Single SQ injection on day 1 |
| 6 | 2 mg/kg AD12367 | 1275 | Single SQ injection on day 1 |
| 7 | 2 mg/kg AD12368 | 1633 | Single SQ injection on day 1 |
| 8 | 2 mg/kg AD12369 | 1817 | Single SQ injection on day 1 |
| 9 | 2 mg/kg AD12370 | 1900 | Single SQ injection on day 1 |
| 10 | 2 mg/kg AD12371 | 1954 | Single SQ injection on day 1 |
| 11 | 2 mg/kg AD11786 | 1313 | Single SQ injection on day 1 |

[0321] Each of the MARC1 RNAi agents included modified nucleotides that were conjugated at the 5′ terminal end of the sense strand to a targeting ligand that included three N-acetyl-galactosamine groups (tridentate ligand) having the modified sequences as set forth in the duplex structures herein. (See Tables 3, 4, 5A, 5B, 5C, and 6 for specific modifications and structure information related to the MARC1 RNAi agents, including (NAG37) s ligand). The MARC1 RNAi agent AD12363 (Group 2) included nucleotide sequences that were designed to inhibit expression of an MARC1 gene at position 305 of the gene; the MARC1 RNAi agent AD12364 (Group 3) included nucleotide sequences that were designed to inhibit expression of an MARC1 gene at position 761 of the gene: the MARC1 RNAi agent AD12365 (Group 4) included nucleotide sequences that were designed to inhibit expression of an MARC1 gene at position 956 of the gene: the MARC1 RNAi agent AD12366 (Group 5) included nucleotide sequences that were designed to inhibit expression of an MARC1 gene at position 1109 of the gene: the MARC1 RNAi agent AD12367 (Group 6) included nucleotide sequences that were designed to inhibit expression of an MARC1 gene at position 1275 of the gene: the MARC1 RNAi agent AD12368 (Group 7) included nucleotide sequences that were designed to inhibit expression of an MARC1 gene at position 1633 of the gene; the MARC1 RNAi agent AD12369 (Group 8) included nucleotide sequences that were designed to inhibit expression of an MARC1 gene at position 1817 of the gene; the MARC1 RNAi agent AD12370 (Group 9) included nucleotide sequences that were designed to inhibit expression of an MARC1 gene at position 1900 of the gene; the MARC1 RNAi agent AD12371 (Group 10) included nucleotide sequences that were designed to inhibit expression of an MARC1 gene at position 1954 of the gene; the MARC1 RNAi agent AD11786 (Group 11) included nucleotide sequences that were designed to inhibit expression of an MARC1 gene at position 1313 of the gene. (See, e.g., SEQ ID NO:1 and Table 2 for the MARC1 gene referenced).

[0322] Serum was collected on Day 1, 8, 15, and 22. GLuc expression levels were determined pursuant to the procedure set forth in Example 14, above. Data from the experiment are shown in the following Table 31, with average GLuc reflecting the normalized average value of GLuc.

TABLE 31
Average GLuc normalized to pre-treatment and saline
control in MARC1-GLuc-AAV mice of Example 15.

| | Day 8 | | Day 15 | | Day 22 | |
|---|---|---|---|---|---|---|
| | Avg | Std | Avg | Std | Avg | Std |
| Group ID | GLuc | Dev | GLuc | Dev | GLuc | Dev |
| 1. Saline | 1.000 | 0.576 | 1.000 | 0.170 | 1.000 | 0.273 |
| 2. 2 mg/kg AD12363 | 0.301 | 0.147 | 1.351 | 0.378 | 0.997 | 0.193 |
| 3. 2 mg/kg AD12364 | 0.348 | 0.065 | 1.297 | 0.100 | 1.395 | 0.191 |
| 4. 2 mg/kg AD12365 | 0.381 | 0.065 | 0.927 | 0.136 | 1.279 | 0.169 |
| 5. 2 mg/kg AD12366 | 0.425 | 0.112 | 1.066 | 0.240 | 1.205 | 0.173 |
| 6. 2 mg/kg AD12367 | 0.294 | 0.064 | 0.956 | 0.162 | 1.039 | 0.144 |
| 7. 2 mg/kg AD12368 | 0.483 | 0.231 | 1.355 | 0.334 | 1.405 | 0.663 |
| 8. 2 mg/kg AD12369 | 0.346 | 0.122 | 1.007 | 0.199 | 1.379 | 0.291 |
| 9. 2 mg/kg AD12370 | 0.344 | 0.056 | 0.938 | 0.126 | 1.190 | 0.190 |
| 10. 2 mg/kg AD12371 | 0.358 | 0.080 | 1.126 | 0.078 | 1.717 | 0.249 |
| 11. 2 mg/kg AD11786 | 0.300 | 0.031 | 0.930 | 0.260 | 1.023 | 0.194 |

[0323] Groups 2-11 showed reduction in GLuc at Day 8. Groups 4, 6, 9, and 11 showed reduction in GLuc at Day 15. Group 2 showed reduction in GLuc at Day 22.

### Example 16. In Vivo Administration of MARC1 RNAi Agents in Rats

[0324] MARC1 RNAi agents were tested in Sprague Dawley rats for inhibition of MARC1. On Day 1, four (n=4) male Sprague Dawley rat animals were dosed with either saline or RNAi agents formulated in saline (at 3 mg/kg), via subcutaneous (SQ) injection, at 1000 μL per 25 g (4 mL/kg) body weight injection volume. The dosing regimen is in accordance with Table 32 below.

TABLE 32
Dosing for mice of Example 16

| | | Targeted Position | |
|---|---|---|---|
| | Dose (RNAi | of MARC1 (Seq ID | |
| Group | Agent) | No. 1) | Dosing Route |
| 1 | Saline | N/A | Day 1 SQ Injection |
| 2 | 3 mg/kg AD12583 | 405 | Day 1 SQ Injection |
| 3 | 3 mg/kg AD12584 | 406 | Day 1 SQ Injection |
| 4 | 3 mg/kg AD12585 | 409 | Day 1 SQ Injection |
| 5 | 3 mg/kg AD12586 | 411 | Day 1 SQ Injection |
| 6 | 3 mg/kg AD12587 | 564 | Day 1 SQ Injection |
| 7 | 3 mg/kg AD12588 | 565 | Day 1 SQ Injection |
| 8 | 3 mg/kg AD12589 | 566 | Day 1 SQ Injection |
| 9 | 3 mg/kg AD12590 | 567 | Day 1 SQ Injection |
| 10 | 3 mg/kg AD12591 | 901 | Day 1 SQ Injection |
| 11 | 3 mg/kg AD12592 | 1008 | Day 1 SQ Injection |
| 12 | 3 mg/kg AD12593 | 1009 | Day 1 SQ Injection |
| 13 | 3 mg/kg AD12594 | 1012 | Day 1 SQ Injection |
| 14 | 3 mg/kg AD12595 | 1013 | Day 1 SQ Injection |
| 15 | 3 mg/kg AD12596 | 1014 | Day 1 SQ Injection |

[0325] The MARC1 RNAi agents' targeted gene positions of Groups 2-15 are cross-reactive with human MARC1.

[0326] On Day 8 post dosing, animals were sacrificed, and liver tissue was collected. Expression of rat MARC1 was determined using qPCR, with rat β-actin as control. Average MARC1 expression for each animal in liver tissue was normalized relative to pre-dose and control group 1 (Saline). Data from the experiment are shown in the following Table 33.

TABLE 33
Average relative expression of MARC1 in
rat liver, at Day 8, of Example 16.

| | Day 8 | | |
|---|---|---|---|
| | Rel Exp | | |
| Group ID | rMARC1 | Low | High |
| 1. Saline | 1.000 | 0.144 | 0.168 |
| 2. 3 mg/kg AD12583 | 1.031 | 0.278 | 0.380 |
| 3. 3 mg/kg AD12584 | 0.627 | 0.160 | 0.215 |
| 4. 3 mg/kg AD12585 | 0.436 | 0.071 | 0.084 |
| 5. 3 mg/kg AD12586 | 1.471 | 0.341 | 0.444 |
| 6. 3 mg/kg AD12587 | 1.158 | 0.297 | 0.400 |
| 7. 3 mg/kg AD12588 | 1.191 | 0.242 | 0.303 |
| 8. 3 mg/kg AD12589 | 0.874 | 0.152 | 0.184 |
| 9. 3 mg/kg AD12590 | 0.549 | 0.067 | 0.077 |
| 10. 3 mg/kg AD12591 | 0.369 | 0.104 | 0.144 |
| 11. 3 mg/kg AD12592 | 1.321 | 0.169 | 0.194 |
| 12. 3 mg/kg AD12593 | 1.051 | 0.162 | 0.191 |
| 13. 3 mg/kg AD12594 | 1.149 | 0.225 | 0.280 |
| 14. 3 mg/kg AD12595 | 0.561 | 0.145 | 0.195 |
| 15. 3 mg/kg AD12596 | 0.405 | 0.103 | 0.139 |

[0327] Groups 3, 4, 8-10, 14, and 15 showed reduction in rMARC1 at Day 8.

### Example 17. In Vivo Administration of MARC1 RNAi Agents in Rats

[0328] MARC1 RNAi agents were tested in Sprague Dawley rats for inhibition of MARC1. On Day 1, four (n=4) male Sprague Dawley rat animals were dosed with either saline or RNAi agents formulated in saline (at 3 mg/kg), via subcutaneous (SQ) injection, at 1000 ML per 25 g (4 mL/kg) body weight injection volume. The dosing regimen is in accordance with Table 34 below.

TABLE 34
Dosing for mice of Example 17

| | | Targeted Position | |
|---|---|---|---|
| | Dose (RNAi | of MARC1 (Seq ID | |
| Group | Agent) | No. 1) | Dosing Route |
| 1 | Saline | N/A | Day 1 SQ Injection |
| 2 | 3 mg/kg AD12596 | 1014 | Day 1 SQ Injection |
| 3 | 3 mg/kg AD13452 | 1014 | Day 1 SQ Injection |
| 4 | 3 mg/kg AD13453 | 1014 | Day 1 SQ Injection |
| 5 | 3 mg/kg AD13454 | 1014 | Day 1 SQ Injection |
| 6 | 3 mg/kg AD13455 | 1014 | Day 1 SQ Injection |
| 7 | 3 mg/kg AD13456 | 1014 | Day 1 SQ Injection |
| 8 | 3 mg/kg AD13457 | 1014 | Day 1 SQ Injection |
| 9 | 3 mg/kg AD13458 | 1014 | Day 1 SQ Injection |
| 10 | 3 mg/kg AD13459 | 1014 | Day 1 SQ Injection |

[0329] The MARC1 RNAi agents' targeted gene positions of Groups 2-10 are cross-reactive with human MARC1.

[0330] On Day 8 post dosing, animals were sacrificed, and liver tissue was collected. Expression of rat MARC1 was determined using qPCR, with rat β-actin as control. Average MARC1 expression for each animal in liver tissue was normalized relative to pre-dose and control group 1 (Saline). Data from the experiment are shown in the following Table 35.

TABLE 35
Average relative expression of MARC1 in
rat liver, at Day 8, of Example 17.

| | Day 8 | | |
|---|---|---|---|
| | Rel Exp | | |
| Group ID | rMARC1 | Low | High |
| 1. Saline | 1.000 | 0.132 | 0.151 |
| 2. 3 mg/kg AD12596 | 0.559 | 0.246 | 0.439 |
| 3. 3 mg/kg AD13452 | 0.437 | 0.083 | 0.102 |
| 4. 3 mg/kg AD13453 | 0.469 | 0.113 | 0.149 |
| 5. 3 mg/kg AD13454 | 0.361 | 0.075 | 0.094 |
| 6. 3 mg/kg AD13455 | 0.486 | 0.138 | 0.192 |
| 7. 3 mg/kg AD13456 | 0.414 | 0.061 | 0.072 |
| 8. 3 mg/kg AD13457 | 0.394 | 0.136 | 0.208 |
| 9. 3 mg/kg AD13458 | 0.573 | 0.160 | 0.222 |
| 10. 3 mg/kg AD13459 | 0.368 | 0.056 | 0.066 |

[0331] Groups 2-10 showed reduction in rMARC1 at Day 8.

### Example 18. In Vivo Administration of MARC1 RNAi Agents in Cynomolgus Monkeys

[0332] MARC1 RNAi agents were tested in Cynomolgus monkeys for inhibition of MARC1. Liver biopsies were collected from all animals on Day −7 and used as internal reference samples for the purpose of normalization. On Day 1, four groups with three (n=3) animals per group of female Cynomolgus macaques (non-naïve) monkey animals were dosed with RNAi agents formulated in saline (at 3 mg/kg), via subcutaneous (SQ) injection with syringe and needle in the mid-scapular region, at 0.3 mL/kg body weight injection volume. On Days 15 and 43, additional liver biopsies were collected. All animals were fasted for at least 12 but not more than 18 hours prior to sedation and collection of liver biopsies. The dosing regimen is in accordance with Table 36 below.

TABLE 36
Dosing for mice of Example 18

| | | Targeted Position | |
|---|---|---|---|
| | Dose (RNAi | of MARC1 (Seq ID | |
| Group | Agent) | No. 1) | Dosing Route |
| 1 | 3 mg/kg AD11786 | 1313 | Day 1 SQ Injection |
| 2 | 3 mg/kg AD11778 | 1089 | Day 1 SQ Injection |
| 3 | 3 mg/kg AD12363 | 305 | Day 1 SQ Injection |
| 4 | 3 mg/kg AD12369 | 1817 | Day 1 SQ Injection |

[0333] Before each SQ injection, the test animals were first sedated. Sedation was accomplished using Ketamine HCl (10 mg/kg), administered as an intramuscular (IM) injection (none was injected into the quadriceps). Individual doses of MARC1 RNAi agents were calculated based on the body weights recorded on each day of dosing.

[0334] For each animal, liver biopsy samples (approximately 200 mg each (160 to 240 mg: ±10%)) were collected for exploratory gene knockdown analysis.

[0335] Serum blood was collected on Day −7, Day 1, Day 15, Day 29, and Day 43, prior to liver biopsy sample collections or dose administration when applicable, and from any animals found in moribund condition or sacrificed at an unscheduled interval.

[0336] Expression of cyno MARC1 was determined using qPCR, with cyno ARLI as control. Average MARC1 expression for each animal in liver tissue was normalized relative to Day −7 sample level for each individual test animal. Mean relative expression was then calculated for each group from individual normalized values. Data from the experiment are shown in the following Table 37.

TABLE 37
Average MARC1 normalized to pre-treatment
Cynomolgus monkeys, of Example 18.

| | Day −7 (Pre-Dose) | | | Day 15 | | |
|---|---|---|---|---|---|---|
| | Rel Exp | | | Rel Exp | | |
| Group ID | MARC1 | Low | High | MARC1 | Low | High |
| 1. 3 mg/kg AD11786 | 1.000 | 0.446 | 0.805 | 0.446 | 0.137 | 0.199 |
| 2. 3 mg/kg AD11778 | 1.000 | 0.497 | 0.987 | 0.824 | 0.255 | 0.369 |
| 3. 3 mg/kg AD12363 | 1.000 | 0.601 | 1.504 | 0.836 | 0.515 | 1.339 |
| 4. 3 mg/kg AD12369 | 1.000 | 0.125 | 0.142 | 0.548 | 0.164 | 0.235 |

| | Day 43 | | |
|---|---|---|---|
| | Rel Exp | | |
| Group ID | MARC1 | Low | High |
| 1. 3 mg/kg AD11786 | 0.355 | 0.159 | 0.289 |
| 2. 3 mg/kg AD11778 | 0.715 | 0.309 | .554 |
| 3. 3 mg/kg AD12363 | 0.926 | 0.510 | 1.133 |
| 4. 3 mg/kg AD12369 | 0.228 | 0.079 | 0.120 |

[0337] Groups 1˜4 showed reduction in MARC1 by Day 15 and Day 43 post-dose.

[0338] MARC1 protein levels were quantified via a scheduled LC-MS/MS assay. For this, cynomolgus liver samples were homogenized using RIPA Lysis and Extraction Buffer (Thermo Scientific). Proteins were extracted using a magnetic bead protocol and trypsin-digested for 20 hours in the presence of internal standards. LC-MS/MS-based peptide quantitation was performed, and area-under-the-response-curve for two MARC1-specific peptides (sequences listed below), the corresponding internal standards as well as a specific peptide for the SLC25A3 protein quantified. SLC25A3 is a phosphate carrier protein that was chosen as a normalizing protein for its juxtaposition to MARC1 protein in the mitochondrial membrane. SLC25A3-normalized MARC1 protein concentrations in the liver of the Cynomolgus monkey test animals are shown in the following Table 38.

TABLE 38
MARC1 protein levels in Cynomolgus monkey liver, relative to pre-dose and
SLC25A3 expression, of Example 18.

| | | Day −7 (Pre-Dose) | | |
|---|---|---|---|---|
| Group ID | Peptide sequence | Rel MARC1 | Low | High |
| 1. 3 mg/kg AD11786 | DLLLPIK | 1.00 | 0.87 | 1.13 |
| | SPLFGQYFVLENPGTIK | 1.00 | 0.81 | 1.19 |
| 2. 3 mg/kg AD11778 | DLLLPIK | 1.00 | 0.83 | 1.17 |
| | SPLFGQYFVLENPGTIK | 1.00 | 0.66 | 1.34 |
| | DLLLPIK | 1.00 | 0.83 | 1.17 |
| 3. 3 mg/kg AD12363 | SPLFGQYFVLENPGTIK | 1.00 | 0.54 | 1.46 |
| 4. 3 mg/kg AD12369 | DLLLPIK | 1.00 | 0.89 | 1.11 |
| | SPLFGQYFVLENPGTIK | 1.00 | 0.79 | 1.21 |
| | | Day 15 | | |
| Group ID | Peptide sequence | Rel MARC1 | Low | High |
| 1. 3 mg/kg AD11786 | DLLLPIK | 0.63 | 0.49 | 0.90 |
| | SPLFGQYFVLENPGTIK | 0.61 | 0.29 | 1.07 |
| 2. 3 mg/kg AD11778 | DLLLPIK | 0.89 | 0.77 | 1.00 |
| | SPLFGQYFVLENPGTIK | 1.15 | 0.47 | 1.72 |
| 3. 3 mg/kg AD12363 | DLLLPIK | 0.97 | 0.70 | 1.17 |
| | SPLFGQYFVLENPGTIK | 1.06 | 0.50 | 1.81 |
| 4. 3 mg/kg AD12369 | DLLLPIK | 0.64 | 0.57 | 0.71 |
| | SPLFGQYFVLENPGTIK | 0.68 | 0.56 | 0.76 |
| | | Day 43 | | |
| Group ID | Peptide sequence | Rel MARC1 | Low | High |
| 1. 3 mg/kg AD11786 | DLLLPIK | 0.42 | 0.32 | 0.62 |
| | SPLFGQYFVLENPGTIK | 0.68 | 0.47 | 1.03 |
| 2. 3 mg/kg AD11778 | DLLLPIK | 0.65 | 0.58 | 0.72 |
| | SPLFGQYFVLENPGTIK | 1.17 | 0.67 | 1.63 |
| 3. 3 mg/kg AD12363 | DLLLPIK | 1.14 | 0.81 | 1.46 |
| | SPLFGQYFVLENPGTIK | 2.12 | 0.86 | 2.87 |
| 4. 3 mg/kg AD12369 | DLLLPIK | 0.37 | 0.34 | 0.42 |
| | SPLFGQYFVLENPGTIK | 0.42 | 0.27 | 0.66 |

[0339] Group 4 (3 mg/kg AD12369) showed time-dependent >50% MARC1 protein knockdown.

### Example 19. In Vivo Administration of MARC1 RNAi Agents in Cynomolgus Monkeys

[0340] MARC1 RNAi agents were tested in Cynomolgus monkeys for inhibition of MARC1. On Day 1 and Day 29, four groups with three (n=3) animals per group of male Cynomolgus macaques (non-naïve) monkey animals were dosed with RNAi agents formulated in saline (at 3 mg/kg), via subcutaneous (SQ) injection, at 0.3 mL/kg body weight injection volume. The dosing regimen is in accordance with Table 39 below.

TABLE 39
Dosing for mice of Example 19

| | Dose (RNAi | | Dose | # Animals |
|---|---|---|---|---|
| Group | Agent) | Dosing Route | Volume | (n=) |
| 1 | 3.0 mg/kg AD12976 | Day 1 and 29 SQ | 0.3 ml/kg | n = 3 |
| | | Injection | | |
| 2 | 3.0 mg/kg AD13805 | Day 1 and 29 SQ | 0.3 ml/kg | n = 3 |
| | | Injection | | |
| 3 | 3.0 mg/kg AD13445 | Day 1 and 29 SQ | 0.3 ml/kg | n = 3 |
| | | Injection | | |
| 4 | 3.0 mg/kg AD13925 | Day 1 and 29 SQ | 0.3 ml/kg | n = 3 |
| | | Injection | | |

[0341] The test animals were weighed and dosed on Day 1 and Day 29, via subcutaneous (SQ) administration, with a syringe and needle in the mid-scapular region.

[0342] Liver biopsies were collected on Day −7 (pre-dose), 15, 29, and 43. Liver biopsies were collected as a sedated procedure. Animals were fasted overnight (at least 12 hours but less than 18 hours) prior to each liver biopsy collection. For each animal, liver biopsy samples (˜40 mg each, 30-60 mg, +/−10%) were collected for gene knockdown analysis. For Group 2 animals only, on Day 15, an additional liver biopsy (˜40 mg each, 30 to 60 mg: +10%) was collected. Liver biopsies were also collected from any animals found in moribund condition or sacrificed at an unscheduled internal, if applicable.

[0343] Blood was collected on Day −7 (pre-dose), 1, 15, 29, and 43, prior to liver biopsy sample collections or RNAi agent dose administration when applicable. Blood was also collected from any animals found in moribund condition or sacrificed at an unscheduled internal, if applicable. Animals were fasted overnight (at least 12 hours but less than 24 hours) for scheduled collections. Fasting duration was consistent between collections (+/−1 hour). Animals were not fasted for unscheduled collections. The blood collection site was femoral vein, with saphenous vein as alternative collection site.

[0344] Sedation was accomplished using Ketamine HCl (10 mg/kg), administered as an intramuscular (IM) injection (none was injected into the quadriceps).

[0345] Expression of cMARC1 was determined using qPCR, with cyno ARLI as endogenous control. Average MARC1 expression for each animal in liver tissue was normalized relative to Day −7 sample level for each individual test animal. Mean relative expression was then calculated for each group from individual normalized values. Data from the experiment are shown in the following Table 40.

TABLE 40
Average MARC1 normalized to pre-treatment
Cynomolgus monkeys, of Example 19.

| | Day −7 (Pre-Dose) | | | Day 15 | | |
|---|---|---|---|---|---|---|
| | Rel Exp | | | Rel Exp | | |
| Group ID | MARC1 | Low | High | MARC1 | Low | High |
| 1. 3.0 mg/kg AD12976 | 1.000 | 0.666 | 1.991 | 0.801 | 0.411 | 0.844 |
| 2. 3.0 mg/kg AD13805 | 1.000 | 0.600 | 1.499 | 0.712 | 0.352 | 0.696 |
| 3. 3.0 mg/kg AD13445 | 1.000 | 0.650 | 1.855 | 0.849 | 0.430 | 0.869 |
| 4. 3.0 mg/kg AD13925 | 1.000 | 0.644 | 1.805 | 0.553 | 0.378 | 1.188 |
| | Day −29 | | | Day 43 | | |
| | Rel Exp | | | Rel Exp | | |
| Group ID | MARC1 | Low | High | MARC1 | Low | High |
| 1. 3.0 mg/kg AD12976 | 0.920 | 0.420 | 0.771 | 0.495 | 0.279 | 0.638 |
| 2. 3.0 mg/kg AD13805 | 0.388 | 0.208 | 0.447 | 0.250 | 0.142 | 0.327 |
| 3. 3.0 mg/kg AD13445 | 1.024 | 0.601 | 1.453 | 0.886 | 0.529 | 1.312 |
| 4. 3.0 mg/kg AD13925 | 0.302 | 0.190 | 0.510 | 0.235 | 0.143 | 0.368 |

[0346] Groups 1˜4 showed reduction in MARC1 by Day 15 and Day 43 post-dose.

[0347] MARC1 protein levels were quantified via a scheduled LC-MS/MS assay. For this, cynomolgus liver samples were homogenized using RIPA Lysis and Extraction Buffer (Thermo Scientific). Proteins were extracted using a magnetic bead protocol and trypsin-digested for 20 hours in the presence of internal standards. LC-MS/MS-based peptide quantitation was performed, and area-under-the-response-curve for two MARC1-specific peptides (sequences listed below), the corresponding internal standards as well as a specific peptide for the SLC25A3 protein quantified. SLC25A3 is a phosphate carrier protein that was chosen as a normalizing protein for its juxtaposition to MARC1 protein in the mitochondrial membrane. SLC25A3-normalized MARC1 protein concentrations in the liver of the Cynomolgus monkey test animals are shown in the following Table 41 and Table 42. Table 41 and Table 42 show MARC1 protein levels as quantified by their respective peptide sequences in accordance with LC-MS/MS assay.

TABLE 41
MARC1 protein levels in Cynomolgus monkey liver (quantified
using peptide sequence: DLLLPIK), relative to pre-
dose and SLC25A3 expression, of Example 19.

| | Day −7 | | Day 15 | |
|---|---|---|---|---|
| | Rel Exp | | Rel Exp | |
| Group ID | MARC1 | Std Dev | MARC1 | Std Dev |
| 1. 3.0 mg/kg AD12976 | 1.000 | 0.000 | 0.787 | 0.119 |
| 2. 3.0 mg/kg AD13805 | 1.000 | 0.000 | 0.536 | 0.232 |
| 3. 3.0 mg/kg AD13445 | 1.000 | 0.000 | 1.048 | 0.271 |
| 4. 3.0 mg/kg AD13925 | 1.000 | 0.000 | 0.475 | 0.030 |
| | Day 29 | | Day 43 | |
| | Rel Exp | | Rel Exp | |
| Group ID | MARC1 | Std Dev | MARC1 | Std Dev |
| 1. 3.0 mg/kg AD12976 | 0.744 | 0.123 | 0.642 | 0.153 |
| 2. 3.0 mg/kg AD13805 | 0.449 | 0.147 | 0.281 | 0.101 |
| 3. 3.0 mg/kg AD13445 | 0.874 | 0.188 | 0.943 | 0.057 |
| 4. 3.0 mg/kg AD13925 | 0.400 | 0.109 | 0.323 | 0.057 |

[0348] MARC1 RNAi agents showed MARC1 protein inhibition out to at least 43 days post dose. Groups 1, 2, and 4 showed reduction in MARC1 at all time points, while Group 3 showed negligible reduction at all time points. More specifically, AD13805 achieved approximately 71% inhibition (0.281) of MARC1 at Day 43, after 2×3.0 mg/kg dose.

TABLE 42
MARC1 protein levels in Cynomolgus monkey liver (quantified
using peptide sequence: SPLFGQYFVLENPGTIK), relative
to pre-dose and SLC25A3 expression, of Example 19.

| | Day −7 | | Day 15 | |
|---|---|---|---|---|
| | Rel Exp | | Rel Exp | |
| Group ID | MARC1 | Std Dev | MARC1 | Std Dev |
| 1. 3.0 mg/kg AD12976 | 1.000 | 0.000 | 0.820 | 0.056 |
| 2. 3.0 mg/kg AD13805 | 1.000 | 0.000 | 0.481 | 0.135 |
| 3. 3.0 mg/kg AD13445 | 1.000 | 0.000 | 0.969 | 0.083 |
| 4. 3.0 mg/kg AD13925 | 1.000 | 0.000 | 0.544 | 0.047 |
| | Day 29 | | Day 43 | |
| | Rel Exp | | Rel Exp | |
| Group ID | MARC1 | Std Dev | MARC1 | Std Dev |
| 1. 3.0 mg/kg AD12976 | 0.719 | 0.142 | 0.642 | 0.191 |
| 2. 3.0 mg/kg AD13805 | 0.383 | 0.069 | 0.245 | 0.065 |
| 3. 3.0 mg/kg AD13445 | 0.875 | 0.143 | 0.740 | 0.107 |
| 4. 3.0 mg/kg AD13925 | 0.363 | 0.059 | 0.286 | 0.019 |

[0349] MARC1 RNAi agents showed MARC1 protein inhibition out to at least 43 days post dose. Groups 1, 2, and 4 showed reduction in MARC1 at all time points, while Group 3 showed less significant reduction at all time points (Day 15 reduction is negligible). More specifically, AD13805 achieved approximately 75% inhibition (0.245) of MARC1 at Day 43, after 2×3.0 mg/kg dose.

### OTHER EMBODIMENTS

[0350] It is to be understood that while the invention has been described in conjunction with the detailed description thereof, the foregoing description is intended to illustrate and not limit the scope of the invention, which is defined by the scope of the appended claims. Other aspects, advantages, and modifications are within the scope of the following claims.

The application's sequence listing, which the Patent Office published only in electronic form, follows.

SEQUENCE LISTING (1791 sequences)

SEQ ID NO: 1 - RNA, 7287 nt, Homo sapiens
  source 1..7287: mol_type = mRNA
cttgccgccgccacctcgcggagaagccagccatgggcgccgccggctcctccgcgctggcgcgctttgtcctcctcgcgcaatcccggcccgggtggctcggggttgccgcgctgggcctgaccgcggtggcgctgggggctgtcgcctggcgccgcgcatggcccacgcggcgccggcggctgctgcagcaggtgggcacagtggcgcagctctggatctaccctgtgaaatcctgcaagggggtgccggtgagcgaggcggagtgcacggccatggggctgcgcagcggcaacctgcgggacaggttttggcttgtgatcaaccaggagggaaacatggttactgctcgccaggaacctcgcctggtcctgatttccctgacctgcgatggtgacaccctgactctcagtgcagcctacacaaaggacctactactgcctatcaaaacgcccaccacaaatgcagtgcacaagtgcagagtgcacggcctggagatagagggcagggactgtggcgaggccaccgcccagtggataaccagcttcctgaagtcacagccctaccgcctggtgcacttcgagcctcacatgcgaccgagacgtcctcatcaaatagcagacttgttccgacccaaggaccagattgcttactcagacaccagcccattcttgatcctttctgaggcgtcgctggcggatctcaactccaggctagagaagaaagttaaagcaaccaacttcaggcccaatattgtaatttcaggatgcgatgtctatgcagaggattcttgggatgagcttcttattggtgacgtggaactgaaaagggtgatggcttgttccagatgcattttaaccacagtggacccagacaccggtgtcatgagcaggaaggaaccgctggaaacactgaagagttatcgccagtgtgacccttcagaacgaaagttatatggaaaatcaccactctttgggcagtattttgtgctggaaaacccagggaccatcaaagtgggagaccctgtgtacctgctgggccagtaatgggaaccgtatgtcctggaatattagatgccttttaaaaatgttctcaaaaatgacaacacttgaagcatggtgtttcagaactgagacctctacattttctttaaatttgtgattttcacatttttcgtcttttggacttctggtgtctcaatgcttcaatgtcccagtgcaaaaagtaaagaaatatagtctcaataacttagtaggacttcagtaagtcacttaaatgacaagacaggattctgaaaactccccgtttaactgattatggaatagttctttctcctgcttctccgtttatctaccaagagcgcagacttgcatcctgtcactaccactcgttagagaaagagaagaagagaaagaggaagagtgggtgggctggaagaatatcctagaatgtgttattgcccctgttcatgaggtacgcaatgaaaattaaattgcaccccaaatatggctggaatgccacttcccttttcttctcaagccccgggctagcttttgaaatggcataaagactgaggtgaccttcaggaagcactgcagatattaattttccatagatctggatctggccctgctgcttctcagacagcattggatttcctaaaggtgctcaggaggatggttgtgtagtcatggaggacccctggatccttgccattcccctcagctaatgacggagtgctccttctccagttccgggtgaaaaagttctgaattctgtggaggagaagaaaagtgattcagtgatttcagatagactactgaaaacctttaaagggggaaaaggaaagcatatgtcagttgtttaaaacccaatatctattttttaactgattgtataactctaagatctgatgaagtatattttttattgccattttgtcctttgattatattgggaagttgactaaacttgaaaaatgtttttaaaactgtgaataaatggaagctactttgactagtttcagatcttactaacttcttggcacaaagttagactgtgaaagctgactgaggctgggcacaggggctcatgcctgtaattccagcactttgggaggccaaggtgggagaatggcttgagcccaggagtttgagaccagcccagaaaatataatgggatcctgtcgctacaaaatgtttttaaaatgcactcggtgtggtggtgtgtgcctgcagtcctggctatggctactcgggaggatgaggtagaaggattggttgagcccaggagcgggagattgaggctgcagtgagttatgattgcaccactacactccagcctgagtgatagagtgagaccctatctctaaaaaagaaacaggaaaaaaaaagaaagctgactgaggtgaatgggcaaagccagtaattctgacacctgaccacagctgggtcttctgcataatggacctcctcacccacagcctcccaggcaagcacccatgtttgaaggactatcaagtcaacatgctttttaccaaaagctgcacatttttcactttgattttataaaagaggtcagtaatcgctgaaatctagctgagccctgaagtaaagttctgagcaaagaggtgcatgtgcttgttttatggttggtgaattattacagtttgttttctgcatgcttggcatgaggtgaataattacatcaattttccagagaacctgggccatcaccttccccaacaagtccagttgatgttgaaactacagatagattgagacaaagcgaagtgttcagcaagtagcattactaatgggaccgggggacccgtgggagagtgagtgtacacaggatttaggaaaccatgtgaatatgggctctctgggaatagccaataggtagggagcaatcagaaacccaaggtttggtggctcttcctaggtatttataattagtggcaagtgaaagccttagtcctgaatttctaaccacttgtaagaactaacagccacttctctgtgccccgtccgggcagtaaccatcattctccatggacaggctctcggggtagctagctctgcagggcagcacccacgtggaagggagcacccagaaaccctcctcactgggcagacctgtccttctgtgcctcacagtgtgaggaagattcctgtttgaagagagaagttccagtgacctctagaatctcagagtagttgccaagctttctgtcagtgagatttaaaggccatttacttgtgtttattttatatttaatgagttggttaatgccagagacaaagctgatatcccatttattttggatactgagcatttgcacactattccacttgaaatatagaatcaggaatgtaggccatcccagactttcagatcttacaacagcaaatgacagatgtttgagatcaggccaaaatatccaccctcggtgggcatctcctctgtgtggcaacttatgctgcagccacagtggggagtcacaaactcagagctggaggtcttgaaaaggacaatgtgggccaggctccggaggggctgcctaaaggcttgcttttgtgactctcctgcagaaaatgttagaaacttccaaccgaaagacgagggcagcaacttatacacacgaaggcagaaagaaattggggaaggggaggctgttggaattcaggccgttgtcctatagggagaaatactcctcctctccttctccctttactgataacggggcatggtgaggagatgagcttgtgagggtctgccagtttggtaagagtgcatggggaggttgggtaaattagactagccaaatgggacttcgggaaaccatttatgaggctgtcaccaacagtgatggcaggctgaaattccaggcaagtgctcccagcattccaagagtgtatcaaattaaagcaacccatgatggtggagaacagatacattaaagttccttgaaaatgacagagtggctctcagaccagaccttgattgtgggtataatcggagtgttgctaccacaccctaacactgcatttcccgtgttttattggtccatggaattctgaaagtttgcctttcgggatgcttctaaaaacaattccatggaccagtaagtttggaaagtcctgcgtgcctcacttctcttcaaaggcaaaaggctctggagaggccttcatgaagacatctgtgtttaatgctgcccttcccaaaggtctgtttttgactgtcttttgagaaatgatcctctgatctctaggcagaatgccagtgagccaaggaatcccagttagcaggaggggtgcactcatgggaagactgaagaagttaaaagttcccgccaagtgaaggagacctatcttgggacacttccccttgtcctctcccttgcccctcttgctggagtaaaaggatggaactgggacttgataggttaaaggaggtgtggagaagtgtcttagaccagctctcctgttgtgggccttagggagaagcactctctttcttcgggatcattttccaaacatgcatttttggatggatagggtggatcagggtgagggaagggaaaccaaactctctctaaccttgcccttacagcaatacctgtgatgtaagttacaaaaccacctgtgatgaaagtgctccaggatgcttcatgcaccagggaggggtgccctgtttctcttctgctagcttctcctttcttttttttttttcttcttttttttgagacagtgtctcactctgttgccaggctggagtgcagtggtgagatctcagctcactgcagcctctgcctcccaggttcaagcaattcttctgcctcagcctcccgagtagctggtgtgtctggagttggttccttctggtgggttcttggtctcgctgacttcaagaatgaagccacagaccttcgcagtgagtgttacagctcttaaaggtggcacggacccaaagtgagcagtagcaagatttattgtggagagcgaaagaacaaagcttcggaaggggacccaaatgggctgctgctgctggctggggtggccaccttttattcccttatttgtccctgcccatgtcctgctgattgctccattttacagagtgctgattggtccattttacagagtgctgattggtgcatttacaatcctttagctagacacagagtgccgattggtgagtttttacagtgctgattggtgcatttacaatcctttagctagacacagaacactgactggtgcatttataatcctctagctagaaagaaaagttctccaagtccccactagacccaggaagtccagctggcttcacctctcactgggactacaggtgcacaccaccacacccagctaatttttgtatttttagtagagacggggtttcaccatgttgttcaggatggtctcgaactcttgatctcgtgatctgcccgcctcggcctcccaaagtgctgggattacagttgtgagccaccacgcccggccctagcttttcctttctgttgcaagtcctctcaactagtgttgccttccaccctacaaagcagaattacctcagaagtcctatggccctgactctatctatgtctgcacaaagcactactgtgctttgctgtctgcaagaacagagattgtttgcttcaaccactttctctgaatggatgaatgagttatgatgatatctaaagttacccaatttcaagcaagaggaagaatctggctcggtaccacagatgttcttggaattgggatagtaaaaaagtccctgaggcatcccttggtctgctctgaccacactctcttcacaggaagaggcttgggccacagctctgactataactctgctcttcctccaaacacagctgaggaattgggtggtggggcacctgctcccatgctctgtggcctggctcagagagaagagttgccttaattacattattattcttcctggacaggctgtaggttgtgtaaagtaacaaaaaggactgagaagtgacttcccattcagcctcttccaaggccatttttgataggcaggtcaaattcactcacatttggttatttgttggccagtctagtgcattcacccttgctggtcctcagtcatgctcctttacctttacagagcatcctagactgctcttcctcttaccttccttgtgaaacccacaacccctagtccctccccttccctggcatttgttatgccctctaccaatccctgacctggtattggtcagtctccaatcctggtggatccctgtgggaactaagttaagtctaacttttgtctccctctttagaatttactgggagtactgtaaataaactattgttgttataattatttctgattaacatttttacacctaacaaagtctcagagagattgaatttactgggttgaagggaggagcaccttccacatgacctgcccagcaattaaagccgcttgttagtccgaggcccaggacggccgaggacagctggagagctcttcgttgcaggcagctctggttaacatcaaccgggaaagctctttgtaaacacatgaataattgatcgtccagcgctcacatagctaccgcggatctgagcccgtatgactcatttgcgagccattcctgtcgtctggatgccataacattggaggaatgatgatcgtttcttggaggttcttctgtggccagagttgccaagaccaaggctgtaatggtttgttatgatgacctttgttattccattaggctcaattgctttaaaaaatgatgtgtgcatactttaggaacgtttttaccctttatgttgacctgacatcatagtttatattataaaatgtattaatgacagaagagtgttttcatgtcccaaggacaaattttaacaaccataatctgccctcagtcatcataaatataaatgtattggtcaaacagatctcgttaatgtggccaagataaatgcaagtctatattttaaggcagtcgaagtcctagagaatatatctggagcttttgtggggctaagagatcttgtatatatgctatcaaaaggctgagaaaattaacatgttcccccctctgattttgcattggacagatataaatgtcttggggatgtcaagtaagattgttcacatagtttctggacaccattaatgcctgatggggtgaatcttagttcttaaagctatattctgctcattatgctcacagggcttttgaaaagagaacaaaataaagatttcaagtcttagcaa

SEQ ID NO: 2 - RNA, 19 nt, synthetic construct
  source 1..19: mol_type = other RNA
ggttttggcttgtgatcaa

SEQ ID NO: 3 - RNA, 19 nt, synthetic construct
  source 1..19: mol_type = other RNA
gttttggcttgtgatcaac

SEQ ID NO: 4 - RNA, 19 nt, synthetic construct
  source 1..19: mol_type = other RNA
ttttggcttgtgatcaacc

SEQ ID NO: 5 - RNA, 19 nt, synthetic construct
  source 1..19: mol_type = other RNA
caggagggaaacatggtta

SEQ ID NO: 6 - RNA, 19 nt, synthetic construct
  source 1..19: mol_type = other RNA
tctcagtgcagcctacaca

SEQ ID NO: 7 - RNA, 19 nt, synthetic construct
  source 1..19: mol_type = other RNA
ctcagtgcagcctacacaa

SEQ ID NO: 8 - RNA, 19 nt, synthetic construct
  source 1..19: mol_type = other RNA
agtgcagcctacacaaagg

SEQ ID NO: 9 - RNA, 19 nt, synthetic construct
  source 1..19: mol_type = other RNA
tgcagcctacacaaaggac

SEQ ID NO: 10 - RNA, 19 nt, synthetic construct
  source 1..19: mol_type = other RNA
acacaaaggacctactact

SEQ ID NO: 11 - RNA, 19 nt, synthetic construct
  source 1..19: mol_type = other RNA
taaccagcttcctgaagtc

SEQ ID NO: 12 - RNA, 19 nt, synthetic construct
  source 1..19: mol_type = other RNA
ccgcctggtgcacttcgag

SEQ ID NO: 13 - RNA, 19 nt, synthetic construct
  source 1..19: mol_type = other RNA
cgcctggtgcacttcgagc

SEQ ID NO: 14 - RNA, 19 nt, synthetic construct
  source 1..19: mol_type = other RNA
gcctggtgcacttcgagcc

SEQ ID NO: 15 - RNA, 19 nt, synthetic construct
  source 1..19: mol_type = other RNA
cctggtgcacttcgagcct

SEQ ID NO: 16 - RNA, 19 nt, synthetic construct
  source 1..19: mol_type = other RNA
cgtcctcatcaaatagcag

SEQ ID NO: 17 - RNA, 19 nt, synthetic construct
  source 1..19: mol_type = other RNA
tcaaatagcagacttgttc

SEQ ID NO: 18 - RNA, 19 nt, synthetic construct
  source 1..19: mol_type = other RNA
caaatagcagacttgttcc

SEQ ID NO: 19 - RNA, 19 nt, synthetic construct
  source 1..19: mol_type = other RNA
aaatagcagacttgttccg

SEQ ID NO: 20 - RNA, 19 nt, synthetic construct
  source 1..19: mol_type = other RNA
ggaccagattgcttactca

SEQ ID NO: 21 - RNA, 19 nt, synthetic construct
  source 1..19: mol_type = other RNA
cagattgcttactcagaca

SEQ ID NO: 22 - RNA, 19 nt, synthetic construct
  source 1..19: mol_type = other RNA
ttgcttactcagacaccag

SEQ ID NO: 23 - RNA, 19 nt, synthetic construct
  source 1..19: mol_type = other RNA
ggctagagaagaaagttaa

SEQ ID NO: 24 - RNA, 19 nt, synthetic construct
  source 1..19: mol_type = other RNA
agagaagaaagttaaagca

SEQ ID NO: 25 - RNA, 19 nt, synthetic construct
  source 1..19: mol_type = other RNA
agaagaaagttaaagcaac

SEQ ID NO: 26 - RNA, 19 nt, synthetic construct
  source 1..19: mol_type = other RNA
gcccaatattgtaatttca

SEQ ID NO: 27 - RNA, 19 nt, synthetic construct
  source 1..19: mol_type = other RNA
caggatgcgatgtctatgc

SEQ ID NO: 28 - RNA, 19 nt, synthetic construct
  source 1..19: mol_type = other RNA
tccagatgcattttaacca

SEQ ID NO: 29 - RNA, 19 nt, synthetic construct
  source 1..19: mol_type = other RNA
ctggaaacactgaagagtt

SEQ ID NO: 30 - RNA, 19 nt, synthetic construct
  source 1..19: mol_type = other RNA
acccttcagaacgaaagtt

SEQ ID NO: 31 - RNA, 19 nt, synthetic construct
  source 1..19: mol_type = other RNA
cccttcagaacgaaagtta

SEQ ID NO: 32 - RNA, 19 nt, synthetic construct
  source 1..19: mol_type = other RNA
cagaacgaaagttatatgg

SEQ ID NO: 33 - RNA, 19 nt, synthetic construct
  source 1..19: mol_type = other RNA
gaacgaaagttatatggaa

SEQ ID NO: 34 - RNA, 19 nt, synthetic construct
  source 1..19: mol_type = other RNA
aaagttatatggaaaatca

SEQ ID NO: 35 - RNA, 19 nt, synthetic construct
  source 1..19: mol_type = other RNA
tggaaaatcaccactcttt

SEQ ID NO: 36 - RNA, 19 nt, synthetic construct
  source 1..19: mol_type = other RNA
gaaaatcaccactctttgg

SEQ ID NO: 37 - RNA, 19 nt, synthetic construct
  source 1..19: mol_type = other RNA
caaagtgggagaccctgtg

SEQ ID NO: 38 - RNA, 19 nt, synthetic construct
  source 1..19: mol_type = other RNA
aaagtgggagaccctgtgt

SEQ ID NO: 39 - RNA, 19 nt, synthetic construct
  source 1..19: mol_type = other RNA
gtgggagaccctgtgtacc

SEQ ID NO: 40 - RNA, 19 nt, synthetic construct
  source 1..19: mol_type = other RNA
tgggagaccctgtgtacct

SEQ ID NO: 41 - RNA, 19 nt, synthetic construct
  source 1..19: mol_type = other RNA
gggagaccctgtgtacctg

SEQ ID NO: 42 - RNA, 19 nt, synthetic construct
  source 1..19: mol_type = other RNA
gtcctggaatattagatgc

SEQ ID NO: 43 - RNA, 19 nt, synthetic construct
  source 1..19: mol_type = other RNA
tcctggaatattagatgcc

SEQ ID NO: 44 - RNA, 19 nt, synthetic construct
  source 1..19: mol_type = other RNA
cctggaatattagatgcct

SEQ ID NO: 45 - RNA, 19 nt, synthetic construct
  source 1..19: mol_type = other RNA
ctggaatattagatgcctt

SEQ ID NO: 46 - RNA, 19 nt, synthetic construct
  source 1..19: mol_type = other RNA
tctcaaaaatgacaacact

SEQ ID NO: 47 - RNA, 19 nt, synthetic construct
  source 1..19: mol_type = other RNA
tgacaacacttgaagcatg

SEQ ID NO: 48 - RNA, 19 nt, synthetic construct
  source 1..19: mol_type = other RNA
aacacttgaagcatggtgt

SEQ ID NO: 49 - RNA, 19 nt, synthetic construct
  source 1..19: mol_type = other RNA
gaagcatggtgtttcagaa

SEQ ID NO: 50 - RNA, 19 nt, synthetic construct
  source 1..19: mol_type = other RNA
agcatggtgtttcagaact

SEQ ID NO: 51 - RNA, 19 nt, synthetic construct
  source 1..19: mol_type = other RNA
agaactgagacctctacat

SEQ ID NO: 52 - RNA, 19 nt, synthetic construct
  source 1..19: mol_type = other RNA
agacctctacattttcttt

SEQ ID NO: 53 - RNA, 19 nt, synthetic construct
  source 1..19: mol_type = other RNA
tgattttcacatttttcgt

SEQ ID NO: 54 - RNA, 19 nt, synthetic construct
  source 1..19: mol_type = other RNA
gtgtctcaatgcttcaatg

SEQ ID NO: 55 - RNA, 19 nt, synthetic construct
  source 1..19: mol_type = other RNA
tctcaatgcttcaatgtcc

SEQ ID NO: 56 - RNA, 19 nt, synthetic construct
  source 1..19: mol_type = other RNA
cttagtaggacttcagtaa

SEQ ID NO: 57 - RNA, 19 nt, synthetic construct
  source 1..19: mol_type = other RNA
atgacaagacaggattctg

SEQ ID NO: 58 - RNA, 19 nt, synthetic construct
  source 1..19: mol_type = other RNA
tgacaagacaggattctga

SEQ ID NO: 59 - RNA, 19 nt, synthetic construct
  source 1..19: mol_type = other RNA
gacaagacaggattctgaa

SEQ ID NO: 60 - RNA, 19 nt, synthetic construct
  source 1..19: mol_type = other RNA
acaggattctgaaaactcc

SEQ ID NO: 61 - RNA, 19 nt, synthetic construct
  source 1..19: mol_type = other RNA
cgtttaactgattatggaa

SEQ ID NO: 62 - RNA, 19 nt, synthetic construct
  source 1..19: mol_type = other RNA
tgattatggaatagttctt

SEQ ID NO: 63 - RNA, 19 nt, synthetic construct
  source 1..19: mol_type = other RNA
ttatggaatagttctttct

SEQ ID NO: 64 - RNA, 19 nt, synthetic construct
  source 1..19: mol_type = other RNA
tatggaatagttctttctc

SEQ ID NO: 65 - RNA, 19 nt, synthetic construct
  source 1..19: mol_type = other RNA
cctgcttctccgtttatct

SEQ ID NO: 66 - RNA, 19 nt, synthetic construct
  source 1..19: mol_type = other RNA
gaagaatatcctagaatgt

SEQ ID NO: 67 - RNA, 19 nt, synthetic construct
  source 1..19: mol_type = other RNA
tttccatagatctggatct

SEQ ID NO: 68 - RNA, 19 nt, synthetic construct
  source 1..19: mol_type = other RNA
gcttctcagacagcattgg

SEQ ID NO: 69 - RNA, 19 nt, synthetic construct
  source 1..19: mol_type = other RNA
ttctcagacagcattggat

SEQ ID NO: 70 - RNA, 19 nt, synthetic construct
  source 1..19: mol_type = other RNA
acagcattggatttcctaa

SEQ ID NO: 71 - RNA, 19 nt, synthetic construct
  source 1..19: mol_type = other RNA
cattggatttcctaaaggt

SEQ ID NO: 72 - RNA, 19 nt, synthetic construct
  source 1..19: mol_type = other RNA
ttggatttcctaaaggtgc

SEQ ID NO: 73 - RNA, 19 nt, synthetic construct
  source 1..19: mol_type = other RNA
actgaaaacctttaaaggg

SEQ ID NO: 74 - RNA, 19 nt, synthetic construct
  source 1..19: mol_type = other RNA
ggaaagcatatgtcagttg

SEQ ID NO: 75 - RNA, 19 nt, synthetic construct
  source 1..19: mol_type = other RNA
tgtcagttgtttaaaaccc

SEQ ID NO: 76 - RNA, 19 nt, synthetic construct
  source 1..19: mol_type = other RNA
aactctaagatctgatgaa

SEQ ID NO: 77 - RNA, 19 nt, synthetic construct
  source 1..19: mol_type = other RNA
actctaagatctgatgaag

SEQ ID NO: 78 - RNA, 19 nt, synthetic construct
  source 1..19: mol_type = other RNA
tctaagatctgatgaagta

SEQ ID NO: 79 - RNA, 19 nt, synthetic construct
  source 1..19: mol_type = other RNA
attgccattttgtcctttg

SEQ ID NO: 80 - RNA, 19 nt, synthetic construct
  source 1..19: mol_type = other RNA
ccattttgtcctttgatta

SEQ ID NO: 81 - RNA, 19 nt, synthetic construct
  source 1..19: mol_type = other RNA
gggaagttgactaaacttg

SEQ ID NO: 82 - RNA, 19 nt, synthetic construct
  source 1..19: mol_type = other RNA
ggaagttgactaaacttga

SEQ ID NO: 83 - RNA, 19 nt, synthetic construct
  source 1..19: mol_type = other RNA
tgtgaataaatggaagcta

SEQ ID NO: 84 - RNA, 19 nt, synthetic construct
  source 1..19: mol_type = other RNA
actagtttcagatcttact

SEQ ID NO: 85 - RNA, 19 nt, synthetic construct
  source 1..19: mol_type = other RNA
gtttcagatcttactaact

SEQ ID NO: 86 - RNA, 19 nt, synthetic construct
  source 1..19: mol_type = other RNA
ttcagatcttactaacttc

SEQ ID NO: 87 - RNA, 19 nt, synthetic construct
  source 1..19: mol_type = other RNA
gcatgtgcttgttttatgg

SEQ ID NO: 88 - RNA, 19 nt, synthetic construct
  source 1..19: mol_type = other RNA
gacaaagcgaagtgttcag

SEQ ID NO: 89 - RNA, 19 nt, synthetic construct
  source 1..19: mol_type = other RNA
ccagtgacctctagaatct

SEQ ID NO: 90 - RNA, 19 nt, synthetic construct
  source 1..19: mol_type = other RNA
gcatttgcacactattcca

SEQ ID NO: 91 - RNA, 19 nt, synthetic construct
  source 1..19: mol_type = other RNA
gacagatgtttgagatcag

SEQ ID NO: 92 - RNA, 19 nt, synthetic construct
  source 1..19: mol_type = other RNA
tgtgtggcaacttatgctg

SEQ ID NO: 93 - RNA, 19 nt, synthetic construct
  source 1..19: mol_type = other RNA
gaccagaccttgattgtgg

SEQ ID NO: 94 - RNA, 19 nt, synthetic construct
  source 1..19: mol_type = other RNA
ggagaagcactctctttct

SEQ ID NO: 95 - RNA, 19 nt, synthetic construct
  source 1..19: mol_type = other RNA
aaccaaactctctctaacc

SEQ ID NO: 96 - RNA, 19 nt, synthetic construct
  source 1..19: mol_type = other RNA
caaactctctctaaccttg

SEQ ID NO: 97 - RNA, 19 nt, synthetic construct
  source 1..19: mol_type = other RNA
gatgtaagttacaaaacca

SEQ ID NO: 98 - RNA, 19 nt, synthetic construct
  source 1..19: mol_type = other RNA
ccacctgtgatgaaagtgc

SEQ ID NO: 99 - RNA, 19 nt, synthetic construct
  source 1..19: mol_type = other RNA
actggtgcatttataatcc

SEQ ID NO: 100 - RNA, 19 nt, synthetic construct
  source 1..19: mol_type = other RNA
agctctgactataactctg

SEQ ID NO: 101 - RNA, 19 nt, synthetic construct
  source 1..19: mol_type = other RNA
cctttacagagcatcctag

SEQ ID NO: 102 - RNA, 19 nt, synthetic construct
  source 1..19: mol_type = other RNA
aactaagttaagtctaact

SEQ ID NO: 103 - RNA, 19 nt, synthetic construct
  source 1..19: mol_type = other RNA
cagagagattgaatttact

SEQ ID NO: 104 - RNA, 19 nt, synthetic construct
  source 1..19: mol_type = other RNA
gctctggttaacatcaacc

SEQ ID NO: 105 - RNA, 19 nt, synthetic construct
  source 1..19: mol_type = other RNA
tgacctgacatcatagttt

SEQ ID NO: 106 - RNA, 19 nt, synthetic construct
  source 1..19: mol_type = other RNA
ataaaatgtattaatgaca

SEQ ID NO: 107 - RNA, 19 nt, synthetic construct
  source 1..19: mol_type = other RNA
tcttaaagctatattctgc

SEQ ID NO: 108 - RNA, 19 nt, synthetic construct
  source 1..19: mol_type = other RNA
ttgatcacaagccaaaacc

SEQ ID NO: 109 - RNA, 19 nt, synthetic construct
  source 1..19: mol_type = other RNA
atgatcacaagccaaaacc

SEQ ID NO: 110 - RNA, 19 nt, synthetic construct
  source 1..19: mol_type = other RNA
ntgatcacaagccaaaacc

SEQ ID NO: 111 - RNA, 19 nt, synthetic construct
  source 1..19: mol_type = other RNA
ntgatcacaagccaaaacn

SEQ ID NO: 112 - RNA, 19 nt, synthetic construct
  source 1..19: mol_type = other RNA
gttgatcacaagccaaaac

SEQ ID NO: 113 - RNA, 19 nt, synthetic construct
  source 1..19: mol_type = other RNA
tttgatcacaagccaaaac

SEQ ID NO: 114 - RNA, 19 nt, synthetic construct
  source 1..19: mol_type = other RNA
attgatcacaagccaaaac

SEQ ID NO: 115 - RNA, 19 nt, synthetic construct
  source 1..19: mol_type = other RNA
nttgatcacaagccaaaac

SEQ ID NO: 116 - RNA, 19 nt, synthetic construct
  source 1..19: mol_type = other RNA
nttgatcacaagccaaaan

SEQ ID NO: 117 - RNA, 19 nt, synthetic construct
  source 1..19: mol_type = other RNA
ggttgatcacaagccaaaa

SEQ ID NO: 118 - RNA, 19 nt, synthetic construct
  source 1..19: mol_type = other RNA
tgttgatcacaagccaaaa

SEQ ID NO: 119 - RNA, 19 nt, synthetic construct
  source 1..19: mol_type = other RNA
agttgatcacaagccaaaa

SEQ ID NO: 120 - RNA, 19 nt, synthetic construct
  source 1..19: mol_type = other RNA
ngttgatcacaagccaaaa

SEQ ID NO: 121 - RNA, 19 nt, synthetic construct
  source 1..19: mol_type = other RNA
ngttgatcacaagccaaan

SEQ ID NO: 122 - RNA, 19 nt, synthetic construct
  source 1..19: mol_type = other RNA
taaccatgtttccctcctg

SEQ ID NO: 123 - RNA, 19 nt, synthetic construct
  source 1..19: mol_type = other RNA
aaaccatgtttccctcctg

SEQ ID NO: 124 - RNA, 19 nt, synthetic construct
  source 1..19: mol_type = other RNA
naaccatgtttccctcctg

SEQ ID NO: 125 - RNA, 19 nt, synthetic construct
  source 1..19: mol_type = other RNA
naaccatgtttccctcctn

SEQ ID NO: 126 - RNA, 19 nt, synthetic construct
  source 1..19: mol_type = other RNA
tgtgtaggctgcactgaga

SEQ ID NO: 127 - RNA, 19 nt, synthetic construct
  source 1..19: mol_type = other RNA
agtgtaggctgcactgaga

SEQ ID NO: 128 - RNA, 19 nt, synthetic construct
  source 1..19: mol_type = other RNA
ngtgtaggctgcactgaga

SEQ ID NO: 129 - RNA, 19 nt, synthetic construct
  source 1..19: mol_type = other RNA
ngtgtaggctgcactgagn

SEQ ID NO: 130 - RNA, 19 nt, synthetic construct
  source 1..19: mol_type = other RNA
ttgtgtaggctgcactgag

SEQ ID NO: 131 - RNA, 19 nt, synthetic construct
  source 1..19: mol_type = other RNA
atgtgtaggctgcactgag

SEQ ID NO: 132 - RNA, 19 nt, synthetic construct
  source 1..19: mol_type = other RNA
ntgtgtaggctgcactgag

SEQ ID NO: 133 - RNA, 19 nt, synthetic construct
  source 1..19: mol_type = other RNA
ntgtgtaggctgcactgan

SEQ ID NO: 134 - RNA, 19 nt, synthetic construct
  source 1..19: mol_type = other RNA
cctttgtgtaggctgcact

SEQ ID NO: 135 - RNA, 19 nt, synthetic construct
  source 1..19: mol_type = other RNA
tctttgtgtaggctgcact

SEQ ID NO: 136 - RNA, 19 nt, synthetic construct
  source 1..19: mol_type = other RNA
actttgtgtaggctgcact

SEQ ID NO: 137 - RNA, 19 nt, synthetic construct
  source 1..19: mol_type = other RNA
nctttgtgtaggctgcact

SEQ ID NO: 138 - RNA, 19 nt, synthetic construct
  source 1..19: mol_type = other RNA
nctttgtgtaggctgcacn

SEQ ID NO: 139 - RNA, 19 nt, synthetic construct
  source 1..19: mol_type = other RNA
gtcctttgtgtaggctgca

SEQ ID NO: 140 - RNA, 19 nt, synthetic construct
  source 1..19: mol_type = other RNA
ttcctttgtgtaggctgca

SEQ ID NO: 141 - RNA, 19 nt, synthetic construct
  source 1..19: mol_type = other RNA
atcctttgtgtaggctgca

SEQ ID NO: 142 - RNA, 19 nt, synthetic construct
  source 1..19: mol_type = other RNA
ntcctttgtgtaggctgca

SEQ ID NO: 143 - RNA, 19 nt, synthetic construct
  source 1..19: mol_type = other RNA
ntcctttgtgtaggctgcn

SEQ ID NO: 144 - RNA, 19 nt, synthetic construct
  source 1..19: mol_type = other RNA
agtagtaggtcctttgtgt

SEQ ID NO: 145 - RNA, 19 nt, synthetic construct
  source 1..19: mol_type = other RNA
tgtagtaggtcctttgtgt

SEQ ID NO: 146 - RNA, 19 nt, synthetic construct
  source 1..19: mol_type = other RNA
ngtagtaggtcctttgtgt

SEQ ID NO: 147 - RNA, 19 nt, synthetic construct
  source 1..19: mol_type = other RNA
ngtagtaggtcctttgtgn

SEQ ID NO: 148 - RNA, 19 nt, synthetic construct
  source 1..19: mol_type = other RNA
gacttcaggaagctggtta

SEQ ID NO: 149 - RNA, 19 nt, synthetic construct
  source 1..19: mol_type = other RNA
tacttcaggaagctggtta

SEQ ID NO: 150 - RNA, 19 nt, synthetic construct
  source 1..19: mol_type = other RNA
aacttcaggaagctggtta

SEQ ID NO: 151 - RNA, 19 nt, synthetic construct
  source 1..19: mol_type = other RNA
nacttcaggaagctggtta

SEQ ID NO: 152 - RNA, 19 nt, synthetic construct
  source 1..19: mol_type = other RNA
nacttcaggaagctggttn

SEQ ID NO: 153 - RNA, 19 nt, synthetic construct
  source 1..19: mol_type = other RNA
ctcgaagtgcaccaggcgg

SEQ ID NO: 154 - RNA, 19 nt, synthetic construct
  source 1..19: mol_type = other RNA
ttcgaagtgcaccaggcgg

SEQ ID NO: 155 - RNA, 19 nt, synthetic construct
  source 1..19: mol_type = other RNA
atcgaagtgcaccaggcgg

SEQ ID NO: 156 - RNA, 19 nt, synthetic construct
  source 1..19: mol_type = other RNA
ntcgaagtgcaccaggcgg

SEQ ID NO: 157 - RNA, 19 nt, synthetic construct
  source 1..19: mol_type = other RNA
ntcgaagtgcaccaggcgn

SEQ ID NO: 158 - RNA, 19 nt, synthetic construct
  source 1..19: mol_type = other RNA
gctcgaagtgcaccaggcg

SEQ ID NO: 159 - RNA, 19 nt, synthetic construct
  source 1..19: mol_type = other RNA
tctcgaagtgcaccaggcg

SEQ ID NO: 160 - RNA, 19 nt, synthetic construct
  source 1..19: mol_type = other RNA
actcgaagtgcaccaggcg

SEQ ID NO: 161 - RNA, 19 nt, synthetic construct
  source 1..19: mol_type = other RNA
nctcgaagtgcaccaggcg

SEQ ID NO: 162 - RNA, 19 nt, synthetic construct
  source 1..19: mol_type = other RNA
nctcgaagtgcaccaggcn

SEQ ID NO: 163 - RNA, 19 nt, synthetic construct
  source 1..19: mol_type = other RNA
ggctcgaagtgcaccaggc

SEQ ID NO: 164 - RNA, 19 nt, synthetic construct
  source 1..19: mol_type = other RNA
tgctcgaagtgcaccaggc

SEQ ID NO: 165 - RNA, 19 nt, synthetic construct
  source 1..19: mol_type = other RNA
agctcgaagtgcaccaggc

SEQ ID NO: 166 - RNA, 19 nt, synthetic construct
  source 1..19: mol_type = other RNA
ngctcgaagtgcaccaggc

SEQ ID NO: 167 - RNA, 19 nt, synthetic construct
  source 1..19: mol_type = other RNA
ngctcgaagtgcaccaggn

SEQ ID NO: 168 - RNA, 19 nt, synthetic construct
  source 1..19: mol_type = other RNA
aggctcgaagtgcaccagg

SEQ ID NO: 169 - RNA, 19 nt, synthetic construct
  source 1..19: mol_type = other RNA
tggctcgaagtgcaccagg

SEQ ID NO: 170 - RNA, 19 nt, synthetic construct
  source 1..19: mol_type = other RNA
nggctcgaagtgcaccagg

SEQ ID NO: 171 - RNA, 19 nt, synthetic construct
  source 1..19: mol_type = other RNA
nggctcgaagtgcaccagn

SEQ ID NO: 172 - RNA, 19 nt, synthetic construct
  source 1..19: mol_type = other RNA
ctgctatttgatgaggacg

SEQ ID NO: 173 - RNA, 19 nt, synthetic construct
  source 1..19: mol_type = other RNA
ttgctatttgatgaggacg

SEQ ID NO: 174 - RNA, 19 nt, synthetic construct
  source 1..19: mol_type = other RNA
atgctatttgatgaggacg

SEQ ID NO: 175 - RNA, 19 nt, synthetic construct
  source 1..19: mol_type = other RNA
ntgctatttgatgaggacg

SEQ ID NO: 176 - RNA, 19 nt, synthetic construct
  source 1..19: mol_type = other RNA
ntgctatttgatgaggacn

SEQ ID NO: 177 - RNA, 19 nt, synthetic construct
  source 1..19: mol_type = other RNA
gaacaagtctgctatttga

SEQ ID NO: 178 - RNA, 19 nt, synthetic construct
  source 1..19: mol_type = other RNA
taacaagtctgctatttga

SEQ ID NO: 179 - RNA, 19 nt, synthetic construct
  source 1..19: mol_type = other RNA
aaacaagtctgctatttga

SEQ ID NO: 180 - RNA, 19 nt, synthetic construct
  source 1..19: mol_type = other RNA
naacaagtctgctatttga

SEQ ID NO: 181 - RNA, 19 nt, synthetic construct
  source 1..19: mol_type = other RNA
naacaagtctgctatttgn

SEQ ID NO: 182 - RNA, 19 nt, synthetic construct
  source 1..19: mol_type = other RNA
ggaacaagtctgctatttg

SEQ ID NO: 183 - RNA, 19 nt, synthetic construct
  source 1..19: mol_type = other RNA
tgaacaagtctgctatttg

SEQ ID NO: 184 - RNA, 19 nt, synthetic construct
  source 1..19: mol_type = other RNA
agaacaagtctgctatttg

SEQ ID NO: 185 - RNA, 19 nt, synthetic construct
  source 1..19: mol_type = other RNA
ngaacaagtctgctatttg

SEQ ID NO: 186 - RNA, 19 nt, synthetic construct
  source 1..19: mol_type = other RNA
ngaacaagtctgctatttn

SEQ ID NO: 187 - RNA, 19 nt, synthetic construct
  source 1..19: mol_type = other RNA
cggaacaagtctgctattt

SEQ ID NO: 188 - RNA, 19 nt, synthetic construct
  source 1..19: mol_type = other RNA
tggaacaagtctgctattt

SEQ ID NO: 189 - RNA, 19 nt, synthetic construct
  source 1..19: mol_type = other RNA
aggaacaagtctgctattt

SEQ ID NO: 190 - RNA, 19 nt, synthetic construct
  source 1..19: mol_type = other RNA
nggaacaagtctgctattt

SEQ ID NO: 191 - RNA, 19 nt, synthetic construct
  source 1..19: mol_type = other RNA
nggaacaagtctgctattn

SEQ ID NO: 192 - RNA, 19 nt, synthetic construct
  source 1..19: mol_type = other RNA
tgagtaagcaatctggtcc

SEQ ID NO: 193 - RNA, 19 nt, synthetic construct
  source 1..19: mol_type = other RNA
agagtaagcaatctggtcc

SEQ ID NO: 194 - RNA, 19 nt, synthetic construct
  source 1..19: mol_type = other RNA
ngagtaagcaatctggtcc

SEQ ID NO: 195 - RNA, 19 nt, synthetic construct
  source 1..19: mol_type = other RNA
ngagtaagcaatctggtcn

SEQ ID NO: 196 - RNA, 19 nt, synthetic construct
  source 1..19: mol_type = other RNA
tgtctgagtaagcaatctg

SEQ ID NO: 197 - RNA, 19 nt, synthetic construct
  source 1..19: mol_type = other RNA
agtctgagtaagcaatctg

SEQ ID NO: 198 - RNA, 19 nt, synthetic construct
  source 1..19: mol_type = other RNA
ngtctgagtaagcaatctg

SEQ ID NO: 199 - RNA, 19 nt, synthetic construct
  source 1..19: mol_type = other RNA
ngtctgagtaagcaatctn

SEQ ID NO: 200 - RNA, 19 nt, synthetic construct
  source 1..19: mol_type = other RNA
ctggtgtctgagtaagcaa

SEQ ID NO: 201 - RNA, 19 nt, synthetic construct
  source 1..19: mol_type = other RNA
ttggtgtctgagtaagcaa

SEQ ID NO: 202 - RNA, 19 nt, synthetic construct
  source 1..19: mol_type = other RNA
atggtgtctgagtaagcaa

SEQ ID NO: 203 - RNA, 19 nt, synthetic construct
  source 1..19: mol_type = other RNA
ntggtgtctgagtaagcaa

SEQ ID NO: 204 - RNA, 19 nt, synthetic construct
  source 1..19: mol_type = other RNA
ntggtgtctgagtaagcan

SEQ ID NO: 205 - RNA, 19 nt, synthetic construct
  source 1..19: mol_type = other RNA
ttaactttcttctctagcc

SEQ ID NO: 206 - RNA, 19 nt, synthetic construct
  source 1..19: mol_type = other RNA
ataactttcttctctagcc

SEQ ID NO: 207 - RNA, 19 nt, synthetic construct
  source 1..19: mol_type = other RNA
ntaactttcttctctagcc

SEQ ID NO: 208 - RNA, 19 nt, synthetic construct
  source 1..19: mol_type = other RNA
ntaactttcttctctagcn

SEQ ID NO: 209 - RNA, 19 nt, synthetic construct
  source 1..19: mol_type = other RNA
tgctttaactttcttctct

SEQ ID NO: 210 - RNA, 19 nt, synthetic construct
  source 1..19: mol_type = other RNA
agctttaactttcttctct

SEQ ID NO: 211 - RNA, 19 nt, synthetic construct
  source 1..19: mol_type = other RNA
ngctttaactttcttctct

SEQ ID NO: 212 - RNA, 19 nt, synthetic construct
  source 1..19: mol_type = other RNA
ngctttaactttcttctcn

SEQ ID NO: 213 - RNA, 19 nt, synthetic construct
  source 1..19: mol_type = other RNA
gttgctttaactttcttct

SEQ ID NO: 214 - RNA, 19 nt, synthetic construct
  source 1..19: mol_type = other RNA
tttgctttaactttcttct

SEQ ID NO: 215 - RNA, 19 nt, synthetic construct
  source 1..19: mol_type = other RNA
attgctttaactttcttct

SEQ ID NO: 216 - RNA, 19 nt, synthetic construct
  source 1..19: mol_type = other RNA
nttgctttaactttcttct

SEQ ID NO: 217 - RNA, 19 nt, synthetic construct
  source 1..19: mol_type = other RNA
nttgctttaactttcttcn

SEQ ID NO: 218 - RNA, 19 nt, synthetic construct
  source 1..19: mol_type = other RNA
tgaaattacaatattgggc

SEQ ID NO: 219 - RNA, 19 nt, synthetic construct
  source 1..19: mol_type = other RNA
agaaattacaatattgggc

SEQ ID NO: 220 - RNA, 19 nt, synthetic construct
  source 1..19: mol_type = other RNA
ngaaattacaatattgggc

SEQ ID NO: 221 - RNA, 19 nt, synthetic construct
  source 1..19: mol_type = other RNA
ngaaattacaatattgggn

SEQ ID NO: 222 - RNA, 19 nt, synthetic construct
  source 1..19: mol_type = other RNA
gcatagacatcgcatcctg

SEQ ID NO: 223 - RNA, 19 nt, synthetic construct
  source 1..19: mol_type = other RNA
tcatagacatcgcatcctg

SEQ ID NO: 224 - RNA, 19 nt, synthetic construct
  source 1..19: mol_type = other RNA
acatagacatcgcatcctg

SEQ ID NO: 225 - RNA, 19 nt, synthetic construct
  source 1..19: mol_type = other RNA
ncatagacatcgcatcctg

SEQ ID NO: 226 - RNA, 19 nt, synthetic construct
  source 1..19: mol_type = other RNA
ncatagacatcgcatcctn

SEQ ID NO: 227 - RNA, 19 nt, synthetic construct
  source 1..19: mol_type = other RNA
tggttaaaatgcatctgga

SEQ ID NO: 228 - RNA, 19 nt, synthetic construct
  source 1..19: mol_type = other RNA
aggttaaaatgcatctgga

SEQ ID NO: 229 - RNA, 19 nt, synthetic construct
  source 1..19: mol_type = other RNA
nggttaaaatgcatctgga

SEQ ID NO: 230 - RNA, 19 nt, synthetic construct
  source 1..19: mol_type = other RNA
nggttaaaatgcatctggn

SEQ ID NO: 231 - RNA, 19 nt, synthetic construct
  source 1..19: mol_type = other RNA
aactcttcagtgtttccag

SEQ ID NO: 232 - RNA, 19 nt, synthetic construct
  source 1..19: mol_type = other RNA
tactcttcagtgtttccag

SEQ ID NO: 233 - RNA, 19 nt, synthetic construct
  source 1..19: mol_type = other RNA
nactcttcagtgtttccag

SEQ ID NO: 234 - RNA, 19 nt, synthetic construct
  source 1..19: mol_type = other RNA
nactcttcagtgtttccan

SEQ ID NO: 235 - RNA, 19 nt, synthetic construct
  source 1..19: mol_type = other RNA
aactttcgttctgaagggt

SEQ ID NO: 236 - RNA, 19 nt, synthetic construct
  source 1..19: mol_type = other RNA
tactttcgttctgaagggt

SEQ ID NO: 237 - RNA, 19 nt, synthetic construct
  source 1..19: mol_type = other RNA
nactttcgttctgaagggt

SEQ ID NO: 238 - RNA, 19 nt, synthetic construct
  source 1..19: mol_type = other RNA
nactttcgttctgaagggn

SEQ ID NO: 239 - RNA, 19 nt, synthetic construct
  source 1..19: mol_type = other RNA
taactttcgttctgaaggg

SEQ ID NO: 240 - RNA, 19 nt, synthetic construct
  source 1..19: mol_type = other RNA
aaactttcgttctgaaggg

SEQ ID NO: 241 - RNA, 19 nt, synthetic construct
  source 1..19: mol_type = other RNA
naactttcgttctgaaggg

SEQ ID NO: 242 - RNA, 19 nt, synthetic construct
  source 1..19: mol_type = other RNA
naactttcgttctgaaggn

SEQ ID NO: 243 - RNA, 19 nt, synthetic construct
  source 1..19: mol_type = other RNA
ccatataactttcgttctg

SEQ ID NO: 244 - RNA, 19 nt, synthetic construct
  source 1..19: mol_type = other RNA
tcatataactttcgttctg

SEQ ID NO: 245 - RNA, 19 nt, synthetic construct
  source 1..19: mol_type = other RNA
acatataactttcgttctg

SEQ ID NO: 246 - RNA, 19 nt, synthetic construct
  source 1..19: mol_type = other RNA
ncatataactttcgttctg

SEQ ID NO: 247 - RNA, 19 nt, synthetic construct
  source 1..19: mol_type = other RNA
ncatataactttcgttctn

SEQ ID NO: 248 - RNA, 19 nt, synthetic construct
  source 1..19: mol_type = other RNA
ttccatataactttcgttc

SEQ ID NO: 249 - RNA, 19 nt, synthetic construct
  source 1..19: mol_type = other RNA
atccatataactttcgttc

SEQ ID NO: 250 - RNA, 19 nt, synthetic construct
  source 1..19: mol_type = other RNA
ntccatataactttcgttc

SEQ ID NO: 251 - RNA, 19 nt, synthetic construct
  source 1..19: mol_type = other RNA
ntccatataactttcgttn

SEQ ID NO: 252 - RNA, 19 nt, synthetic construct
  source 1..19: mol_type = other RNA
tgattttccatataacttt

SEQ ID NO: 253 - RNA, 19 nt, synthetic construct
  source 1..19: mol_type = other RNA
agattttccatataacttt

SEQ ID NO: 254 - RNA, 19 nt, synthetic construct
  source 1..19: mol_type = other RNA
ngattttccatataacttt

SEQ ID NO: 255 - RNA, 19 nt, synthetic construct
  source 1..19: mol_type = other RNA
ngattttccatataacttn

SEQ ID NO: 256 - RNA, 19 nt, synthetic construct
  source 1..19: mol_type = other RNA
aaagagtggtgattttcca

SEQ ID NO: 257 - RNA, 19 nt, synthetic construct
  source 1..19: mol_type = other RNA
taagagtggtgattttcca

SEQ ID NO: 258 - RNA, 19 nt, synthetic construct
  source 1..19: mol_type = other RNA
naagagtggtgattttcca

SEQ ID NO: 259 - RNA, 19 nt, synthetic construct
  source 1..19: mol_type = other RNA
naagagtggtgattttccn

SEQ ID NO: 260 - RNA, 19 nt, synthetic construct
  source 1..19: mol_type = other RNA
ccaaagagtggtgattttc

SEQ ID NO: 261 - RNA, 19 nt, synthetic construct
  source 1..19: mol_type = other RNA
tcaaagagtggtgattttc

SEQ ID NO: 262 - RNA, 19 nt, synthetic construct
  source 1..19: mol_type = other RNA
acaaagagtggtgattttc

SEQ ID NO: 263 - RNA, 19 nt, synthetic construct
  source 1..19: mol_type = other RNA
ncaaagagtggtgattttc

SEQ ID NO: 264 - RNA, 19 nt, synthetic construct
  source 1..19: mol_type = other RNA
ncaaagagtggtgattttn

SEQ ID NO: 265 - RNA, 19 nt, synthetic construct
  source 1..19: mol_type = other RNA
cacagggtctcccactttg

SEQ ID NO: 266 - RNA, 19 nt, synthetic construct
  source 1..19: mol_type = other RNA
tacagggtctcccactttg

SEQ ID NO: 267 - RNA, 19 nt, synthetic construct
  source 1..19: mol_type = other RNA
aacagggtctcccactttg

SEQ ID NO: 268 - RNA, 19 nt, synthetic construct
  source 1..19: mol_type = other RNA
nacagggtctcccactttg

SEQ ID NO: 269 - RNA, 19 nt, synthetic construct
  source 1..19: mol_type = other RNA
nacagggtctcccactttn

SEQ ID NO: 270 - RNA, 19 nt, synthetic construct
  source 1..19: mol_type = other RNA
acacagggtctcccacttt

SEQ ID NO: 271 - RNA, 19 nt, synthetic construct
  source 1..19: mol_type = other RNA
tcacagggtctcccacttt

SEQ ID NO: 272 - RNA, 19 nt, synthetic construct
  source 1..19: mol_type = other RNA
ncacagggtctcccacttt

SEQ ID NO: 273 - RNA, 19 nt, synthetic construct
  source 1..19: mol_type = other RNA
ncacagggtctcccacttn

SEQ ID NO: 274 - RNA, 19 nt, synthetic construct
  source 1..19: mol_type = other RNA
ggtacacagggtctcccac

SEQ ID NO: 275 - RNA, 19 nt, synthetic construct
  source 1..19: mol_type = other RNA
tgtacacagggtctcccac

SEQ ID NO: 276 - RNA, 19 nt, synthetic construct
  source 1..19: mol_type = other RNA
agtacacagggtctcccac

SEQ ID NO: 277 - RNA, 19 nt, synthetic construct
  source 1..19: mol_type = other RNA
ngtacacagggtctcccac

SEQ ID NO: 278 - RNA, 19 nt, synthetic construct
  source 1..19: mol_type = other RNA
ngtacacagggtctcccan

SEQ ID NO: 279 - RNA, 19 nt, synthetic construct
  source 1..19: mol_type = other RNA
aggtacacagggtctccca

SEQ ID NO: 280 - RNA, 19 nt, synthetic construct
  source 1..19: mol_type = other RNA
tggtacacagggtctccca

SEQ ID NO: 281 - RNA, 19 nt, synthetic construct
  source 1..19: mol_type = other RNA
nggtacacagggtctccca

SEQ ID NO: 282 - RNA, 19 nt, synthetic construct
  source 1..19: mol_type = other RNA
nggtacacagggtctcccn

SEQ ID NO: 283 - RNA, 19 nt, synthetic construct
  source 1..19: mol_type = other RNA
caggtacacagggtctccc

SEQ ID NO: 284 - RNA, 19 nt, synthetic construct
  source 1..19: mol_type = other RNA
taggtacacagggtctccc

SEQ ID NO: 285 - RNA, 19 nt, synthetic construct
  source 1..19: mol_type = other RNA
aaggtacacagggtctccc

SEQ ID NO: 286 - RNA, 19 nt, synthetic construct
  source 1..19: mol_type = other RNA
naggtacacagggtctccc

SEQ ID NO: 287 - RNA, 19 nt, synthetic construct
  source 1..19: mol_type = other RNA
naggtacacagggtctccn

SEQ ID NO: 288 - RNA, 19 nt, synthetic construct
  source 1..19: mol_type = other RNA
gcatctaatattccaggac

SEQ ID NO: 289 - RNA, 19 nt, synthetic construct
  source 1..19: mol_type = other RNA
tcatctaatattccaggac

SEQ ID NO: 290 - RNA, 19 nt, synthetic construct
  source 1..19: mol_type = other RNA
acatctaatattccaggac

SEQ ID NO: 291 - RNA, 19 nt, synthetic construct
  source 1..19: mol_type = other RNA
ncatctaatattccaggac

SEQ ID NO: 292 - RNA, 19 nt, synthetic construct
  source 1..19: mol_type = other RNA
ncatctaatattccaggan

SEQ ID NO: 293 - RNA, 19 nt, synthetic construct
  source 1..19: mol_type = other RNA
ggcatctaatattccagga

SEQ ID NO: 294 - RNA, 19 nt, synthetic construct
  source 1..19: mol_type = other RNA
agcatctaatattccagga

SEQ ID NO: 295 - RNA, 19 nt, synthetic construct
  source 1..19: mol_type = other RNA
tgcatctaatattccagga

SEQ ID NO: 296 - RNA, 19 nt, synthetic construct
  source 1..19: mol_type = other RNA
ngcatctaatattccagga

SEQ ID NO: 297 - RNA, 19 nt, synthetic construct
  source 1..19: mol_type = other RNA
ngcatctaatattccaggn

SEQ ID NO: 298 - RNA, 19 nt, synthetic construct
  source 1..19: mol_type = other RNA
aggcatctaatattccagg

SEQ ID NO: 299 - RNA, 19 nt, synthetic construct
  source 1..19: mol_type = other RNA
tggcatctaatattccagg

SEQ ID NO: 300 - RNA, 19 nt, synthetic construct
  source 1..19: mol_type = other RNA
nggcatctaatattccagg

SEQ ID NO: 301 - RNA, 19 nt, synthetic construct
  source 1..19: mol_type = other RNA
nggcatctaatattccagn

SEQ ID NO: 302 - RNA, 19 nt, synthetic construct
  source 1..19: mol_type = other RNA
aaggcatctaatattccag

SEQ ID NO: 303 - RNA, 19 nt, synthetic construct
  source 1..19: mol_type = other RNA
taggcatctaatattccag

SEQ ID NO: 304 - RNA, 19 nt, synthetic construct
  source 1..19: mol_type = other RNA
naggcatctaatattccag

SEQ ID NO: 305 - RNA, 19 nt, synthetic construct
  source 1..19: mol_type = other RNA
naggcatctaatattccan

SEQ ID NO: 306 - RNA, 19 nt, synthetic construct
  source 1..19: mol_type = other RNA
agtgttgtcatttttgaga

SEQ ID NO: 307 - RNA, 19 nt, synthetic construct
  source 1..19: mol_type = other RNA
tgtgttgtcatttttgaga

SEQ ID NO: 308 - RNA, 19 nt, synthetic construct
  source 1..19: mol_type = other RNA
ngtgttgtcatttttgaga

SEQ ID NO: 309 - RNA, 19 nt, synthetic construct
  source 1..19: mol_type = other RNA
ngtgttgtcatttttgagn

SEQ ID NO: 310 - RNA, 19 nt, synthetic construct
  source 1..19: mol_type = other RNA
catgcttcaagtgttgtca

SEQ ID NO: 311 - RNA, 19 nt, synthetic construct
  source 1..19: mol_type = other RNA
tatgcttcaagtgttgtca

SEQ ID NO: 312 - RNA, 19 nt, synthetic construct
  source 1..19: mol_type = other RNA
aatgcttcaagtgttgtca

SEQ ID NO: 313 - RNA, 19 nt, synthetic construct
  source 1..19: mol_type = other RNA
natgcttcaagtgttgtca

SEQ ID NO: 314 - RNA, 19 nt, synthetic construct
  source 1..19: mol_type = other RNA
natgcttcaagtgttgtcn

SEQ ID NO: 315 - RNA, 19 nt, synthetic construct
  source 1..19: mol_type = other RNA
acaccatgcttcaagtgtt

SEQ ID NO: 316 - RNA, 19 nt, synthetic construct
  source 1..19: mol_type = other RNA
tcaccatgcttcaagtgtt

SEQ ID NO: 317 - RNA, 19 nt, synthetic construct
  source 1..19: mol_type = other RNA
ncaccatgcttcaagtgtt

SEQ ID NO: 318 - RNA, 19 nt, synthetic construct
  source 1..19: mol_type = other RNA
ncaccatgcttcaagtgtn

SEQ ID NO: 319 - RNA, 19 nt, synthetic construct
  source 1..19: mol_type = other RNA
ttctgaaacaccatgcttc

SEQ ID NO: 320 - RNA, 19 nt, synthetic construct
  source 1..19: mol_type = other RNA
atctgaaacaccatgcttc

SEQ ID NO: 321 - RNA, 19 nt, synthetic construct
  source 1..19: mol_type = other RNA
ntctgaaacaccatgcttc

SEQ ID NO: 322 - RNA, 19 nt, synthetic construct
  source 1..19: mol_type = other RNA
ntctgaaacaccatgcttn

SEQ ID NO: 323 - RNA, 19 nt, synthetic construct
  source 1..19: mol_type = other RNA
agttctgaaacaccatgct

SEQ ID NO: 324 - RNA, 19 nt, synthetic construct
  source 1..19: mol_type = other RNA
tgttctgaaacaccatgct

SEQ ID NO: 325 - RNA, 19 nt, synthetic construct
  source 1..19: mol_type = other RNA
ngttctgaaacaccatgct

SEQ ID NO: 326 - RNA, 19 nt, synthetic construct
  source 1..19: mol_type = other RNA
ngttctgaaacaccatgcn

SEQ ID NO: 327 - RNA, 19 nt, synthetic construct
  source 1..19: mol_type = other RNA
atgtagaggtctcagttct

SEQ ID NO: 328 - RNA, 19 nt, synthetic construct
  source 1..19: mol_type = other RNA
ttgtagaggtctcagttct

SEQ ID NO: 329 - RNA, 19 nt, synthetic construct
  source 1..19: mol_type = other RNA
ntgtagaggtctcagttct

SEQ ID NO: 330 - RNA, 19 nt, synthetic construct
  source 1..19: mol_type = other RNA
ntgtagaggtctcagttcn

SEQ ID NO: 331 - RNA, 19 nt, synthetic construct
  source 1..19: mol_type = other RNA
aaagaaaatgtagaggtct

SEQ ID NO: 332 - RNA, 19 nt, synthetic construct
  source 1..19: mol_type = other RNA
taagaaaatgtagaggtct

SEQ ID NO: 333 - RNA, 19 nt, synthetic construct
  source 1..19: mol_type = other RNA
naagaaaatgtagaggtct

SEQ ID NO: 334 - RNA, 19 nt, synthetic construct
  source 1..19: mol_type = other RNA
naagaaaatgtagaggtcn

SEQ ID NO: 335 - RNA, 19 nt, synthetic construct
  source 1..19: mol_type = other RNA
acgaaaaatgtgaaaatca

SEQ ID NO: 336 - RNA, 19 nt, synthetic construct
  source 1..19: mol_type = other RNA
tcgaaaaatgtgaaaatca

SEQ ID NO: 337 - RNA, 19 nt, synthetic construct
  source 1..19: mol_type = other RNA
ncgaaaaatgtgaaaatca

SEQ ID NO: 338 - RNA, 19 nt, synthetic construct
  source 1..19: mol_type = other RNA
ncgaaaaatgtgaaaatcn

SEQ ID NO: 339 - RNA, 19 nt, synthetic construct
  source 1..19: mol_type = other RNA
cattgaagcattgagacac

SEQ ID NO: 340 - RNA, 19 nt, synthetic construct
  source 1..19: mol_type = other RNA
tattgaagcattgagacac

SEQ ID NO: 341 - RNA, 19 nt, synthetic construct
  source 1..19: mol_type = other RNA
aattgaagcattgagacac

SEQ ID NO: 342 - RNA, 19 nt, synthetic construct
  source 1..19: mol_type = other RNA
nattgaagcattgagacac

SEQ ID NO: 343 - RNA, 19 nt, synthetic construct
  source 1..19: mol_type = other RNA
nattgaagcattgagacan

SEQ ID NO: 344 - RNA, 19 nt, synthetic construct
  source 1..19: mol_type = other RNA
ggacattgaagcattgaga

SEQ ID NO: 345 - RNA, 19 nt, synthetic construct
  source 1..19: mol_type = other RNA
tgacattgaagcattgaga

SEQ ID NO: 346 - RNA, 19 nt, synthetic construct
  source 1..19: mol_type = other RNA
agacattgaagcattgaga

SEQ ID NO: 347 - RNA, 19 nt, synthetic construct
  source 1..19: mol_type = other RNA
ngacattgaagcattgaga

SEQ ID NO: 348 - RNA, 19 nt, synthetic construct
  source 1..19: mol_type = other RNA
ngacattgaagcattgagn

SEQ ID NO: 349 - RNA, 19 nt, synthetic construct
  source 1..19: mol_type = other RNA
ttactgaagtcctactaag

SEQ ID NO: 350 - RNA, 19 nt, synthetic construct
  source 1..19: mol_type = other RNA
atactgaagtcctactaag

SEQ ID NO: 351 - RNA, 19 nt, synthetic construct
  source 1..19: mol_type = other RNA
ntactgaagtcctactaag

SEQ ID NO: 352 - RNA, 19 nt, synthetic construct
  source 1..19: mol_type = other RNA
ntactgaagtcctactaan

SEQ ID NO: 353 - RNA, 19 nt, synthetic construct
  source 1..19: mol_type = other RNA
cagaatcctgtcttgtcat

SEQ ID NO: 354 - RNA, 19 nt, synthetic construct
  source 1..19: mol_type = other RNA
tagaatcctgtcttgtcat

SEQ ID NO: 355 - RNA, 19 nt, synthetic construct
  source 1..19: mol_type = other RNA
aagaatcctgtcttgtcat

SEQ ID NO: 356 - RNA, 19 nt, synthetic construct
  source 1..19: mol_type = other RNA
nagaatcctgtcttgtcat

SEQ ID NO: 357 - RNA, 19 nt, synthetic construct
  source 1..19: mol_type = other RNA
nagaatcctgtcttgtcan

SEQ ID NO: 358 - RNA, 19 nt, synthetic construct
  source 1..19: mol_type = other RNA
tcagaatcctgtcttgtca

SEQ ID NO: 359 - RNA, 19 nt, synthetic construct
  source 1..19: mol_type = other RNA
acagaatcctgtcttgtca

SEQ ID NO: 360 - RNA, 19 nt, synthetic construct
  source 1..19: mol_type = other RNA
ncagaatcctgtcttgtca

SEQ ID NO: 361 - RNA, 19 nt, synthetic construct
  source 1..19: mol_type = other RNA
ncagaatcctgtcttgtcn

SEQ ID NO: 362 - RNA, 19 nt, synthetic construct
  source 1..19: mol_type = other RNA
ttcagaatcctgtcttgtc

SEQ ID NO: 363 - RNA, 19 nt, synthetic construct
  source 1..19: mol_type = other RNA
atcagaatcctgtcttgtc

SEQ ID NO: 364 - RNA, 19 nt, synthetic construct
  source 1..19: mol_type = other RNA
ntcagaatcctgtcttgtc

SEQ ID NO: 365 - RNA, 19 nt, synthetic construct
  source 1..19: mol_type = other RNA
ntcagaatcctgtcttgtn

SEQ ID NO: 366 - RNA, 19 nt, synthetic construct
  source 1..19: mol_type = other RNA
ggagttttcagaatcctgt

SEQ ID NO: 367 - RNA, 19 nt, synthetic construct
  source 1..19: mol_type = other RNA
tgagttttcagaatcctgt

SEQ ID NO: 368 - RNA, 19 nt, synthetic construct
  source 1..19: mol_type = other RNA
agagttttcagaatcctgt

SEQ ID NO: 369 - RNA, 19 nt, synthetic construct
  source 1..19: mol_type = other RNA
ngagttttcagaatcctgt

SEQ ID NO: 370 - RNA, 19 nt, synthetic construct
  source 1..19: mol_type = other RNA
ngagttttcagaatcctgn

SEQ ID NO: 371 - RNA, 19 nt, synthetic construct
  source 1..19: mol_type = other RNA
ttccataatcagttaaacg

SEQ ID NO: 372 - RNA, 19 nt, synthetic construct
  source 1..19: mol_type = other RNA
atccataatcagttaaacg

SEQ ID NO: 373 - RNA, 19 nt, synthetic construct
  source 1..19: mol_type = other RNA
ntccataatcagttaaacg

SEQ ID NO: 374 - RNA, 19 nt, synthetic construct
  source 1..19: mol_type = other RNA
ntccataatcagttaaacn

SEQ ID NO: 375 - RNA, 19 nt, synthetic construct
  source 1..19: mol_type = other RNA
aagaactattccataatca

SEQ ID NO: 376 - RNA, 19 nt, synthetic construct
  source 1..19: mol_type = other RNA
tagaactattccataatca

SEQ ID NO: 377 - RNA, 19 nt, synthetic construct
  source 1..19: mol_type = other RNA
nagaactattccataatca

SEQ ID NO: 378 - RNA, 19 nt, synthetic construct
  source 1..19: mol_type = other RNA
nagaactattccataatcn

SEQ ID NO: 379 - RNA, 19 nt, synthetic construct
  source 1..19: mol_type = other RNA
agaaagaactattccataa

SEQ ID NO: 380 - RNA, 19 nt, synthetic construct
  source 1..19: mol_type = other RNA
tgaaagaactattccataa

SEQ ID NO: 381 - RNA, 19 nt, synthetic construct
  source 1..19: mol_type = other RNA
ngaaagaactattccataa

SEQ ID NO: 382 - RNA, 19 nt, synthetic construct
  source 1..19: mol_type = other RNA
ngaaagaactattccatan

SEQ ID NO: 383 - RNA, 19 nt, synthetic construct
  source 1..19: mol_type = other RNA
gagaaagaactattccata

SEQ ID NO: 384 - RNA, 19 nt, synthetic construct
  source 1..19: mol_type = other RNA
tagaaagaactattccata

SEQ ID NO: 385 - RNA, 19 nt, synthetic construct
  source 1..19: mol_type = other RNA
aagaaagaactattccata

SEQ ID NO: 386 - RNA, 19 nt, synthetic construct
  source 1..19: mol_type = other RNA
nagaaagaactattccata

SEQ ID NO: 387 - RNA, 19 nt, synthetic construct
  source 1..19: mol_type = other RNA
nagaaagaactattccatn

SEQ ID NO: 388 - RNA, 19 nt, synthetic construct
  source 1..19: mol_type = other RNA
agataaacggagaagcagg

SEQ ID NO: 389 - RNA, 19 nt, synthetic construct
  source 1..19: mol_type = other RNA
tgataaacggagaagcagg

SEQ ID NO: 390 - RNA, 19 nt, synthetic construct
  source 1..19: mol_type = other RNA
ngataaacggagaagcagg

SEQ ID NO: 391 - RNA, 19 nt, synthetic construct
  source 1..19: mol_type = other RNA
ngataaacggagaagcagn

SEQ ID NO: 392 - RNA, 19 nt, synthetic construct
  source 1..19: mol_type = other RNA
acattctaggatattcttc

SEQ ID NO: 393 - RNA, 19 nt, synthetic construct
  source 1..19: mol_type = other RNA
tcattctaggatattcttc

SEQ ID NO: 394 - RNA, 19 nt, synthetic construct
  source 1..19: mol_type = other RNA
ncattctaggatattcttc

SEQ ID NO: 395 - RNA, 19 nt, synthetic construct
  source 1..19: mol_type = other RNA
ncattctaggatattcttn

SEQ ID NO: 396 - RNA, 19 nt, synthetic construct
  source 1..19: mol_type = other RNA
agatccagatctatggaaa

SEQ ID NO: 397 - RNA, 19 nt, synthetic construct
  source 1..19: mol_type = other RNA
tgatccagatctatggaaa

SEQ ID NO: 398 - RNA, 19 nt, synthetic construct
  source 1..19: mol_type = other RNA
ngatccagatctatggaaa

SEQ ID NO: 399 - RNA, 19 nt, synthetic construct
  source 1..19: mol_type = other RNA
ngatccagatctatggaan

SEQ ID NO: 400 - RNA, 19 nt, synthetic construct
  source 1..19: mol_type = other RNA
ccaatgctgtctgagaagc

SEQ ID NO: 401 - RNA, 19 nt, synthetic construct
  source 1..19: mol_type = other RNA
tcaatgctgtctgagaagc

SEQ ID NO: 402 - RNA, 19 nt, synthetic construct
  source 1..19: mol_type = other RNA
acaatgctgtctgagaagc

SEQ ID NO: 403 - RNA, 19 nt, synthetic construct
  source 1..19: mol_type = other RNA
ncaatgctgtctgagaagc

SEQ ID NO: 404 - RNA, 19 nt, synthetic construct
  source 1..19: mol_type = other RNA
ncaatgctgtctgagaagn

SEQ ID NO: 405 - RNA, 19 nt, synthetic construct
  source 1..19: mol_type = other RNA
atccaatgctgtctgagaa

SEQ ID NO: 406 - RNA, 19 nt, synthetic construct
  source 1..19: mol_type = other RNA
ttccaatgctgtctgagaa

SEQ ID NO: 407 - RNA, 19 nt, synthetic construct
  source 1..19: mol_type = other RNA
ntccaatgctgtctgagaa

SEQ ID NO: 408 - RNA, 19 nt, synthetic construct
  source 1..19: mol_type = other RNA
ntccaatgctgtctgagan

SEQ ID NO: 409 - RNA, 19 nt, synthetic construct
  source 1..19: mol_type = other RNA
ttaggaaatccaatgctgt

SEQ ID NO: 410 - RNA, 19 nt, synthetic construct
  source 1..19: mol_type = other RNA
ataggaaatccaatgctgt

SEQ ID NO: 411 - RNA, 19 nt, synthetic construct
  source 1..19: mol_type = other RNA
ntaggaaatccaatgctgt

SEQ ID NO: 412 - RNA, 19 nt, synthetic construct
  source 1..19: mol_type = other RNA
ntaggaaatccaatgctgn

SEQ ID NO: 413 - RNA, 19 nt, synthetic construct
  source 1..19: mol_type = other RNA
acctttaggaaatccaatg

SEQ ID NO: 414 - RNA, 19 nt, synthetic construct
  source 1..19: mol_type = other RNA
tcctttaggaaatccaatg

SEQ ID NO: 415 - RNA, 19 nt, synthetic construct
  source 1..19: mol_type = other RNA
ncctttaggaaatccaatg

SEQ ID NO: 416 - RNA, 19 nt, synthetic construct
  source 1..19: mol_type = other RNA
ncctttaggaaatccaatn

SEQ ID NO: 417 - RNA, 19 nt, synthetic construct
  source 1..19: mol_type = other RNA
gcacctttaggaaatccaa

SEQ ID NO: 418 - RNA, 19 nt, synthetic construct
  source 1..19: mol_type = other RNA
tcacctttaggaaatccaa

SEQ ID NO: 419 - RNA, 19 nt, synthetic construct
  source 1..19: mol_type = other RNA
acacctttaggaaatccaa

SEQ ID NO: 420 - RNA, 19 nt, synthetic construct
  source 1..19: mol_type = other RNA
ncacctttaggaaatccaa

SEQ ID NO: 421 - RNA, 19 nt, synthetic construct
  source 1..19: mol_type = other RNA
ncacctttaggaaatccan

SEQ ID NO: 422 - RNA, 19 nt, synthetic construct
  source 1..19: mol_type = other RNA
ccctttaaaggttttcagt

SEQ ID NO: 423 - RNA, 19 nt, synthetic construct
  source 1..19: mol_type = other RNA
tcctttaaaggttttcagt

SEQ ID NO: 424 - RNA, 19 nt, synthetic construct
  source 1..19: mol_type = other RNA
acctttaaaggttttcagt

SEQ ID NO: 425 - RNA, 19 nt, synthetic construct
  source 1..19: mol_type = other RNA
ncctttaaaggttttcagt

SEQ ID NO: 426 - RNA, 19 nt, synthetic construct
  source 1..19: mol_type = other RNA
ncctttaaaggttttcagn

SEQ ID NO: 427 - RNA, 19 nt, synthetic construct
  source 1..19: mol_type = other RNA
caactgacatatgctttcc

SEQ ID NO: 428 - RNA, 19 nt, synthetic construct
  source 1..19: mol_type = other RNA
taactgacatatgctttcc

SEQ ID NO: 429 - RNA, 19 nt, synthetic construct
  source 1..19: mol_type = other RNA
aaactgacatatgctttcc

SEQ ID NO: 430 - RNA, 19 nt, synthetic construct
  source 1..19: mol_type = other RNA
naactgacatatgctttcc

SEQ ID NO: 431 - RNA, 19 nt, synthetic construct
  source 1..19: mol_type = other RNA
naactgacatatgctttcn

SEQ ID NO: 432 - RNA, 19 nt, synthetic construct
  source 1..19: mol_type = other RNA
gggttttaaacaactgaca

SEQ ID NO: 433 - RNA, 19 nt, synthetic construct
  source 1..19: mol_type = other RNA
tggttttaaacaactgaca

SEQ ID NO: 434 - RNA, 19 nt, synthetic construct
  source 1..19: mol_type = other RNA
aggttttaaacaactgaca

SEQ ID NO: 435 - RNA, 19 nt, synthetic construct
  source 1..19: mol_type = other RNA
nggttttaaacaactgaca

SEQ ID NO: 436 - RNA, 19 nt, synthetic construct
  source 1..19: mol_type = other RNA
nggttttaaacaactgacn

SEQ ID NO: 437 - RNA, 19 nt, synthetic construct
  source 1..19: mol_type = other RNA
ttcatcagatcttagagtt

SEQ ID NO: 438 - RNA, 19 nt, synthetic construct
  source 1..19: mol_type = other RNA
atcatcagatcttagagtt

SEQ ID NO: 439 - RNA, 19 nt, synthetic construct
  source 1..19: mol_type = other RNA
ntcatcagatcttagagtt

SEQ ID NO: 440 - RNA, 19 nt, synthetic construct
  source 1..19: mol_type = other RNA
ntcatcagatcttagagtn

SEQ ID NO: 441 - RNA, 19 nt, synthetic construct
  source 1..19: mol_type = other RNA
cttcatcagatcttagagt

SEQ ID NO: 442 - RNA, 19 nt, synthetic construct
  source 1..19: mol_type = other RNA
tttcatcagatcttagagt

SEQ ID NO: 443 - RNA, 19 nt, synthetic construct
  source 1..19: mol_type = other RNA
attcatcagatcttagagt

SEQ ID NO: 444 - RNA, 19 nt, synthetic construct
  source 1..19: mol_type = other RNA
nttcatcagatcttagagt

SEQ ID NO: 445 - RNA, 19 nt, synthetic construct
  source 1..19: mol_type = other RNA
nttcatcagatcttagagn

SEQ ID NO: 446 - RNA, 19 nt, synthetic construct
  source 1..19: mol_type = other RNA
tacttcatcagatcttaga

SEQ ID NO: 447 - RNA, 19 nt, synthetic construct
  source 1..19: mol_type = other RNA
aacttcatcagatcttaga

SEQ ID NO: 448 - RNA, 19 nt, synthetic construct
  source 1..19: mol_type = other RNA
nacttcatcagatcttaga

SEQ ID NO: 449 - RNA, 19 nt, synthetic construct
  source 1..19: mol_type = other RNA
nacttcatcagatcttagn

SEQ ID NO: 450 - RNA, 19 nt, synthetic construct
  source 1..19: mol_type = other RNA
caaaggacaaaatggcaat

SEQ ID NO: 451 - RNA, 19 nt, synthetic construct
  source 1..19: mol_type = other RNA
taaaggacaaaatggcaat

SEQ ID NO: 452 - RNA, 19 nt, synthetic construct
  source 1..19: mol_type = other RNA
aaaaggacaaaatggcaat

SEQ ID NO: 453 - RNA, 19 nt, synthetic construct
  source 1..19: mol_type = other RNA
naaaggacaaaatggcaat

SEQ ID NO: 454 - RNA, 19 nt, synthetic construct
  source 1..19: mol_type = other RNA
naaaggacaaaatggcaan

SEQ ID NO: 455 - RNA, 19 nt, synthetic construct
  source 1..19: mol_type = other RNA
taatcaaaggacaaaatgg

SEQ ID NO: 456 - RNA, 19 nt, synthetic construct
  source 1..19: mol_type = other RNA
aaatcaaaggacaaaatgg

SEQ ID NO: 457 - RNA, 19 nt, synthetic construct
  source 1..19: mol_type = other RNA
naatcaaaggacaaaatgg

SEQ ID NO: 458 - RNA, 19 nt, synthetic construct
  source 1..19: mol_type = other RNA
naatcaaaggacaaaatgn

SEQ ID NO: 459 - RNA, 19 nt, synthetic construct
  source 1..19: mol_type = other RNA
caagtttagtcaacttccc

SEQ ID NO: 460 - RNA, 19 nt, synthetic construct
  source 1..19: mol_type = other RNA
taagtttagtcaacttccc

SEQ ID NO: 461 - RNA, 19 nt, synthetic construct
  source 1..19: mol_type = other RNA
aaagtttagtcaacttccc

SEQ ID NO: 462 - RNA, 19 nt, synthetic construct
  source 1..19: mol_type = other RNA
naagtttagtcaacttccc

SEQ ID NO: 463 - RNA, 19 nt, synthetic construct
  source 1..19: mol_type = other RNA
naagtttagtcaacttccn

SEQ ID NO: 464 - RNA, 19 nt, synthetic construct
  source 1..19: mol_type = other RNA
tcaagtttagtcaacttcc

SEQ ID NO: 465 - RNA, 19 nt, synthetic construct
  source 1..19: mol_type = other RNA
acaagtttagtcaacttcc

SEQ ID NO: 466 - RNA, 19 nt, synthetic construct
  source 1..19: mol_type = other RNA
ncaagtttagtcaacttcc

SEQ ID NO: 467 - RNA, 19 nt, synthetic construct
  source 1..19: mol_type = other RNA
ncaagtttagtcaacttcn

SEQ ID NO: 468 - RNA, 19 nt, synthetic construct
  source 1..19: mol_type = other RNA
tagcttccatttattcaca

SEQ ID NO: 469 - RNA, 19 nt, synthetic construct
  source 1..19: mol_type = other RNA
aagcttccatttattcaca

SEQ ID NO: 470 - RNA, 19 nt, synthetic construct
  source 1..19: mol_type = other RNA
nagcttccatttattcaca

SEQ ID NO: 471 - RNA, 19 nt, synthetic construct
  source 1..19: mol_type = other RNA
nagcttccatttattcacn

SEQ ID NO: 472 - RNA, 19 nt, synthetic construct
  source 1..19: mol_type = other RNA
agtaagatctgaaactagt

SEQ ID NO: 473 - RNA, 19 nt, synthetic construct
  source 1..19: mol_type = other RNA
tgtaagatctgaaactagt

SEQ ID NO: 474 - RNA, 19 nt, synthetic construct
  source 1..19: mol_type = other RNA
ngtaagatctgaaactagt

SEQ ID NO: 475 - RNA, 19 nt, synthetic construct
  source 1..19: mol_type = other RNA
ngtaagatctgaaactagn

SEQ ID NO: 476 - RNA, 19 nt, synthetic construct
  source 1..19: mol_type = other RNA
agttagtaagatctgaaac

SEQ ID NO: 477 - RNA, 19 nt, synthetic construct
  source 1..19: mol_type = other RNA
tgttagtaagatctgaaac

SEQ ID NO: 478 - RNA, 19 nt, synthetic construct
  source 1..19: mol_type = other RNA
ngttagtaagatctgaaac

SEQ ID NO: 479 - RNA, 19 nt, synthetic construct
  source 1..19: mol_type = other RNA
ngttagtaagatctgaaan

SEQ ID NO: 480 - RNA, 19 nt, synthetic construct
  source 1..19: mol_type = other RNA
gaagttagtaagatctgaa

SEQ ID NO: 481 - RNA, 19 nt, synthetic construct
  source 1..19: mol_type = other RNA
taagttagtaagatctgaa

SEQ ID NO: 482 - RNA, 19 nt, synthetic construct
  source 1..19: mol_type = other RNA
aaagttagtaagatctgaa

SEQ ID NO: 483 - RNA, 19 nt, synthetic construct
  source 1..19: mol_type = other RNA
naagttagtaagatctgaa

SEQ ID NO: 484 - RNA, 19 nt, synthetic construct
  source 1..19: mol_type = other RNA
naagttagtaagatctgan

SEQ ID NO: 485 - RNA, 19 nt, synthetic construct
  source 1..19: mol_type = other RNA
ccataaaacaagcacatgc

SEQ ID NO: 486 - RNA, 19 nt, synthetic construct
  source 1..19: mol_type = other RNA
tcataaaacaagcacatgc

SEQ ID NO: 487 - RNA, 19 nt, synthetic construct
  source 1..19: mol_type = other RNA
acataaaacaagcacatgc

SEQ ID NO: 488 - RNA, 19 nt, synthetic construct
  source 1..19: mol_type = other RNA
ncataaaacaagcacatgc

SEQ ID NO: 489 - RNA, 19 nt, synthetic construct
  source 1..19: mol_type = other RNA
ncataaaacaagcacatgn

SEQ ID NO: 490 - RNA, 19 nt, synthetic construct
  source 1..19: mol_type = other RNA
ctgaacacttcgctttgtc

SEQ ID NO: 491 - RNA, 19 nt, synthetic construct
  source 1..19: mol_type = other RNA
ttgaacacttcgctttgtc

SEQ ID NO: 492 - RNA, 19 nt, synthetic construct
  source 1..19: mol_type = other RNA
atgaacacttcgctttgtc

SEQ ID NO: 493 - RNA, 19 nt, synthetic construct
  source 1..19: mol_type = other RNA
ntgaacacttcgctttgtc

SEQ ID NO: 494 - RNA, 19 nt, synthetic construct
  source 1..19: mol_type = other RNA
ntgaacacttcgctttgtn

SEQ ID NO: 495 - RNA, 19 nt, synthetic construct
  source 1..19: mol_type = other RNA
agattctagaggtcactgg

SEQ ID NO: 496 - RNA, 19 nt, synthetic construct
  source 1..19: mol_type = other RNA
tgattctagaggtcactgg

SEQ ID NO: 497 - RNA, 19 nt, synthetic construct
  source 1..19: mol_type = other RNA
ngattctagaggtcactgg

SEQ ID NO: 498 - RNA, 19 nt, synthetic construct
  source 1..19: mol_type = other RNA
ngattctagaggtcactgn

SEQ ID NO: 499 - RNA, 19 nt, synthetic construct
  source 1..19: mol_type = other RNA
tggaatagtgtgcaaatgc

SEQ ID NO: 500 - RNA, 19 nt, synthetic construct
  source 1..19: mol_type = other RNA
aggaatagtgtgcaaatgc

SEQ ID NO: 501 - RNA, 19 nt, synthetic construct
  source 1..19: mol_type = other RNA
nggaatagtgtgcaaatgc

SEQ ID NO: 502 - RNA, 19 nt, synthetic construct
  source 1..19: mol_type = other RNA
nggaatagtgtgcaaatgn

SEQ ID NO: 503 - RNA, 19 nt, synthetic construct
  source 1..19: mol_type = other RNA
ctgatctcaaacatctgtc

SEQ ID NO: 504 - RNA, 19 nt, synthetic construct
  source 1..19: mol_type = other RNA
ttgatctcaaacatctgtc

SEQ ID NO: 505 - RNA, 19 nt, synthetic construct
  source 1..19: mol_type = other RNA
atgatctcaaacatctgtc

SEQ ID NO: 506 - RNA, 19 nt, synthetic construct
  source 1..19: mol_type = other RNA
ntgatctcaaacatctgtc

SEQ ID NO: 507 - RNA, 19 nt, synthetic construct
  source 1..19: mol_type = other RNA
ntgatctcaaacatctgtn

SEQ ID NO: 508 - RNA, 19 nt, synthetic construct
  source 1..19: mol_type = other RNA
cagcataagttgccacaca

SEQ ID NO: 509 - RNA, 19 nt, synthetic construct
  source 1..19: mol_type = other RNA
tagcataagttgccacaca

SEQ ID NO: 510 - RNA, 19 nt, synthetic construct
  source 1..19: mol_type = other RNA
aagcataagttgccacaca

SEQ ID NO: 511 - RNA, 19 nt, synthetic construct
  source 1..19: mol_type = other RNA
nagcataagttgccacaca

SEQ ID NO: 512 - RNA, 19 nt, synthetic construct
  source 1..19: mol_type = other RNA
nagcataagttgccacacn

SEQ ID NO: 513 - RNA, 19 nt, synthetic construct
  source 1..19: mol_type = other RNA
ccacaatcaaggtctggtc

SEQ ID NO: 514 - RNA, 19 nt, synthetic construct
  source 1..19: mol_type = other RNA
tcacaatcaaggtctggtc

SEQ ID NO: 515 - RNA, 19 nt, synthetic construct
  source 1..19: mol_type = other RNA
acacaatcaaggtctggtc

SEQ ID NO: 516 - RNA, 19 nt, synthetic construct
  source 1..19: mol_type = other RNA
ncacaatcaaggtctggtc

SEQ ID NO: 517 - RNA, 19 nt, synthetic construct
  source 1..19: mol_type = other RNA
ncacaatcaaggtctggtn

SEQ ID NO: 518 - RNA, 19 nt, synthetic construct
  source 1..19: mol_type = other RNA
agaaagagagtgcttctcc

SEQ ID NO: 519 - RNA, 19 nt, synthetic construct
  source 1..19: mol_type = other RNA
tgaaagagagtgcttctcc

SEQ ID NO: 520 - RNA, 19 nt, synthetic construct
  source 1..19: mol_type = other RNA
ngaaagagagtgcttctcc

SEQ ID NO: 521 - RNA, 19 nt, synthetic construct
  source 1..19: mol_type = other RNA
ngaaagagagtgcttctcn

SEQ ID NO: 522 - RNA, 19 nt, synthetic construct
  source 1..19: mol_type = other RNA
ggttagagagagtttggtt

SEQ ID NO: 523 - RNA, 19 nt, synthetic construct
  source 1..19: mol_type = other RNA
tgttagagagagtttggtt

SEQ ID NO: 524 - RNA, 19 nt, synthetic construct
  source 1..19: mol_type = other RNA
agttagagagagtttggtt

SEQ ID NO: 525 - RNA, 19 nt, synthetic construct
  source 1..19: mol_type = other RNA
ngttagagagagtttggtt

SEQ ID NO: 526 - RNA, 19 nt, synthetic construct
  source 1..19: mol_type = other RNA
ngttagagagagtttggtn

SEQ ID NO: 527 - RNA, 19 nt, synthetic construct
  source 1..19: mol_type = other RNA
caaggttagagagagtttg

SEQ ID NO: 528 - RNA, 19 nt, synthetic construct
  source 1..19: mol_type = other RNA
taaggttagagagagtttg

SEQ ID NO: 529 - RNA, 19 nt, synthetic construct
  source 1..19: mol_type = other RNA
aaaggttagagagagtttg

SEQ ID NO: 530 - RNA, 19 nt, synthetic construct
  source 1..19: mol_type = other RNA
naaggttagagagagtttg

SEQ ID NO: 531 - RNA, 19 nt, synthetic construct
  source 1..19: mol_type = other RNA
naaggttagagagagtttn

SEQ ID NO: 532 - RNA, 19 nt, synthetic construct
  source 1..19: mol_type = other RNA
tggttttgtaacttacatc

SEQ ID NO: 533 - RNA, 19 nt, synthetic construct
  source 1..19: mol_type = other RNA
aggttttgtaacttacatc

SEQ ID NO: 534 - RNA, 19 nt, synthetic construct
  source 1..19: mol_type = other RNA
nggttttgtaacttacatc

SEQ ID NO: 535 - RNA, 19 nt, synthetic construct
  source 1..19: mol_type = other RNA
nggttttgtaacttacatn

SEQ ID NO: 536 - RNA, 19 nt, synthetic construct
  source 1..19: mol_type = other RNA
gcactttcatcacaggtgg

SEQ ID NO: 537 - RNA, 19 nt, synthetic construct
  source 1..19: mol_type = other RNA
tcactttcatcacaggtgg

SEQ ID NO: 538 - RNA, 19 nt, synthetic construct
  source 1..19: mol_type = other RNA
acactttcatcacaggtgg

SEQ ID NO: 539 - RNA, 19 nt, synthetic construct
  source 1..19: mol_type = other RNA
ncactttcatcacaggtgg

SEQ ID NO: 540 - RNA, 19 nt, synthetic construct
  source 1..19: mol_type = other RNA
ncactttcatcacaggtgn

SEQ ID NO: 541 - RNA, 19 nt, synthetic construct
  source 1..19: mol_type = other RNA
ggattataaatgcaccagt

SEQ ID NO: 542 - RNA, 19 nt, synthetic construct
  source 1..19: mol_type = other RNA
tgattataaatgcaccagt

SEQ ID NO: 543 - RNA, 19 nt, synthetic construct
  source 1..19: mol_type = other RNA
agattataaatgcaccagt

SEQ ID NO: 544 - RNA, 19 nt, synthetic construct
  source 1..19: mol_type = other RNA
ngattataaatgcaccagt

SEQ ID NO: 545 - RNA, 19 nt, synthetic construct
  source 1..19: mol_type = other RNA
ngattataaatgcaccagn

SEQ ID NO: 546 - RNA, 19 nt, synthetic construct
  source 1..19: mol_type = other RNA
cagagttatagtcagagct

SEQ ID NO: 547 - RNA, 19 nt, synthetic construct
  source 1..19: mol_type = other RNA
tagagttatagtcagagct

SEQ ID NO: 548 - RNA, 19 nt, synthetic construct
  source 1..19: mol_type = other RNA
aagagttatagtcagagct

SEQ ID NO: 549 - RNA, 19 nt, synthetic construct
  source 1..19: mol_type = other RNA
nagagttatagtcagagct

SEQ ID NO: 550 - RNA, 19 nt, synthetic construct
  source 1..19: mol_type = other RNA
nagagttatagtcagagcn

SEQ ID NO: 551 - RNA, 19 nt, synthetic construct
  source 1..19: mol_type = other RNA
ctaggatgctctgtaaagg

SEQ ID NO: 552 - RNA, 19 nt, synthetic construct
  source 1..19: mol_type = other RNA
ttaggatgctctgtaaagg

SEQ ID NO: 553 - RNA, 19 nt, synthetic construct
  source 1..19: mol_type = other RNA
ataggatgctctgtaaagg

SEQ ID NO: 554 - RNA, 19 nt, synthetic construct
  source 1..19: mol_type = other RNA
ntaggatgctctgtaaagg

SEQ ID NO: 555 - RNA, 19 nt, synthetic construct
  source 1..19: mol_type = other RNA
ntaggatgctctgtaaagn

SEQ ID NO: 556 - RNA, 19 nt, synthetic construct
  source 1..19: mol_type = other RNA
agttagacttaacttagtt

SEQ ID NO: 557 - RNA, 19 nt, synthetic construct
  source 1..19: mol_type = other RNA
tgttagacttaacttagtt

SEQ ID NO: 558 - RNA, 19 nt, synthetic construct
  source 1..19: mol_type = other RNA
ngttagacttaacttagtt

SEQ ID NO: 559 - RNA, 19 nt, synthetic construct
  source 1..19: mol_type = other RNA
ngttagacttaacttagtn

SEQ ID NO: 560 - RNA, 19 nt, synthetic construct
  source 1..19: mol_type = other RNA
agtaaattcaatctctctg

SEQ ID NO: 561 - RNA, 19 nt, synthetic construct
  source 1..19: mol_type = other RNA
tgtaaattcaatctctctg

SEQ ID NO: 562 - RNA, 19 nt, synthetic construct
  source 1..19: mol_type = other RNA
ngtaaattcaatctctctg

SEQ ID NO: 563 - RNA, 19 nt, synthetic construct
  source 1..19: mol_type = other RNA
ngtaaattcaatctctctn

SEQ ID NO: 564 - RNA, 19 nt, synthetic construct
  source 1..19: mol_type = other RNA
ggttgatgttaaccagagc

SEQ ID NO: 565 - RNA, 19 nt, synthetic construct
  source 1..19: mol_type = other RNA
tgttgatgttaaccagagc

SEQ ID NO: 566 - RNA, 19 nt, synthetic construct
  source 1..19: mol_type = other RNA
agttgatgttaaccagagc

SEQ ID NO: 567 - RNA, 19 nt, synthetic construct
  source 1..19: mol_type = other RNA
ngttgatgttaaccagagc

SEQ ID NO: 568 - RNA, 19 nt, synthetic construct
  source 1..19: mol_type = other RNA
ngttgatgttaaccagagn

SEQ ID NO: 569 - RNA, 19 nt, synthetic construct
  source 1..19: mol_type = other RNA
aaactatgatgtcaggtca

SEQ ID NO: 570 - RNA, 19 nt, synthetic construct
  source 1..19: mol_type = other RNA
taactatgatgtcaggtca

SEQ ID NO: 571 - RNA, 19 nt, synthetic construct
  source 1..19: mol_type = other RNA
naactatgatgtcaggtca

SEQ ID NO: 572 - RNA, 19 nt, synthetic construct
  source 1..19: mol_type = other RNA
naactatgatgtcaggtcn

SEQ ID NO: 573 - RNA, 19 nt, synthetic construct
  source 1..19: mol_type = other RNA
acattaacgagatctgttt

SEQ ID NO: 574 - RNA, 19 nt, synthetic construct
  source 1..19: mol_type = other RNA
tcattaacgagatctgttt

SEQ ID NO: 575 - RNA, 19 nt, synthetic construct
  source 1..19: mol_type = other RNA
ncattaacgagatctgttt

SEQ ID NO: 576 - RNA, 19 nt, synthetic construct
  source 1..19: mol_type = other RNA
ncattaacgagatctgttn

SEQ ID NO: 577 - RNA, 19 nt, synthetic construct
  source 1..19: mol_type = other RNA
gcagaatatagctttaaga

SEQ ID NO: 578 - RNA, 19 nt, synthetic construct
  source 1..19: mol_type = other RNA
tcagaatatagctttaaga

SEQ ID NO: 579 - RNA, 19 nt, synthetic construct
  source 1..19: mol_type = other RNA
acagaatatagctttaaga

SEQ ID NO: 580 - RNA, 19 nt, synthetic construct
  source 1..19: mol_type = other RNA
ncagaatatagctttaaga

SEQ ID NO: 581 - RNA, 19 nt, synthetic construct
  source 1..19: mol_type = other RNA
ncagaatatagctttaagn

SEQ ID NO: 582 - RNA, 19 nt, synthetic construct
  source 1..19: mol_type = other RNA
ggttttggcttgtgatcaa

SEQ ID NO: 583 - RNA, 19 nt, synthetic construct
  source 1..19: mol_type = other RNA
ggttttggcttgtgatcat

SEQ ID NO: 584 - RNA, 19 nt, synthetic construct
  source 1..19: mol_type = other RNA
ggttttggcttgtgatcan

SEQ ID NO: 585 - RNA, 19 nt, synthetic construct
  source 1..19: mol_type = other RNA
ngttttggcttgtgatcan

SEQ ID NO: 586 - RNA, 19 nt, synthetic construct
  source 1..19: mol_type = other RNA
gttttggcttgtgatcaac

SEQ ID NO: 587 - RNA, 19 nt, synthetic construct
  source 1..19: mol_type = other RNA
gttttggcttgtgatcaaa

SEQ ID NO: 588 - RNA, 19 nt, synthetic construct
  source 1..19: mol_type = other RNA
gttttggcttgtgatcaat

SEQ ID NO: 589 - RNA, 19 nt, synthetic construct
  source 1..19: mol_type = other RNA
gttttggcttgtgatcaan

SEQ ID NO: 590 - RNA, 19 nt, synthetic construct
  source 1..19: mol_type = other RNA
nttttggcttgtgatcaan

SEQ ID NO: 591 - RNA, 19 nt, synthetic construct
  source 1..19: mol_type = other RNA
ttttggcttgtgatcaacc

SEQ ID NO: 592 - RNA, 19 nt, synthetic construct
  source 1..19: mol_type = other RNA
ttttggcttgtgatcaaca

SEQ ID NO: 593 - RNA, 19 nt, synthetic construct
  source 1..19: mol_type = other RNA
ttttggcttgtgatcaact

SEQ ID NO: 594 - RNA, 19 nt, synthetic construct
  source 1..19: mol_type = other RNA
ttttggcttgtgatcaacn

SEQ ID NO: 595 - RNA, 19 nt, synthetic construct
  source 1..19: mol_type = other RNA
ntttggcttgtgatcaacn

SEQ ID NO: 596 - RNA, 19 nt, synthetic construct
  source 1..19: mol_type = other RNA
caggagggaaacatggtta

SEQ ID NO: 597 - RNA, 19 nt, synthetic construct
  source 1..19: mol_type = other RNA
caggagggaaacatggttt

SEQ ID NO: 598 - RNA, 19 nt, synthetic construct
  source 1..19: mol_type = other RNA
caggagggaaacatggttn

SEQ ID NO: 599 - RNA, 19 nt, synthetic construct
  source 1..19: mol_type = other RNA
naggagggaaacatggttn

SEQ ID NO: 600 - RNA, 19 nt, synthetic construct
  source 1..19: mol_type = other RNA
tctcagtgcagcctacaca

SEQ ID NO: 601 - RNA, 19 nt, synthetic construct
  source 1..19: mol_type = other RNA
tctcagtgcagcctacact

SEQ ID NO: 602 - RNA, 19 nt, synthetic construct
  source 1..19: mol_type = other RNA
tctcagtgcagcctacacn

SEQ ID NO: 603 - RNA, 19 nt, synthetic construct
  source 1..19: mol_type = other RNA
nctcagtgcagcctacacn

SEQ ID NO: 604 - RNA, 19 nt, synthetic construct
  source 1..19: mol_type = other RNA
ctcagtgcagcctacacaa

SEQ ID NO: 605 - RNA, 19 nt, synthetic construct
  source 1..19: mol_type = other RNA
ctcagtgcagcctacacat

SEQ ID NO: 606 - RNA, 19 nt, synthetic construct
  source 1..19: mol_type = other RNA
ctcagtgcagcctacacan

SEQ ID NO: 607 - RNA, 19 nt, synthetic construct
  source 1..19: mol_type = other RNA
ntcagtgcagcctacacan

SEQ ID NO: 608 - RNA, 19 nt, synthetic construct
  source 1..19: mol_type = other RNA
agtgcagcctacacaaagg

SEQ ID NO: 609 - RNA, 19 nt, synthetic construct
  source 1..19: mol_type = other RNA
agtgcagcctacacaaaga

SEQ ID NO: 610 - RNA, 19 nt, synthetic construct
  source 1..19: mol_type = other RNA
agtgcagcctacacaaagt

SEQ ID NO: 611 - RNA, 19 nt, synthetic construct
  source 1..19: mol_type = other RNA
agtgcagcctacacaaagn

SEQ ID NO: 612 - RNA, 19 nt, synthetic construct
  source 1..19: mol_type = other RNA
ngtgcagcctacacaaagn

SEQ ID NO: 613 - RNA, 19 nt, synthetic construct
  source 1..19: mol_type = other RNA
tgcagcctacacaaaggac

SEQ ID NO: 614 - RNA, 19 nt, synthetic construct
  source 1..19: mol_type = other RNA
tgcagcctacacaaaggaa

SEQ ID NO: 615 - RNA, 19 nt, synthetic construct
  source 1..19: mol_type = other RNA
tgcagcctacacaaaggat

SEQ ID NO: 616 - RNA, 19 nt, synthetic construct
  source 1..19: mol_type = other RNA
tgcagcctacacaaaggan

SEQ ID NO: 617 - RNA, 19 nt, synthetic construct
  source 1..19: mol_type = other RNA
ngcagcctacacaaaggan

SEQ ID NO: 618 - RNA, 19 nt, synthetic construct
  source 1..19: mol_type = other RNA
acacaaaggacctactact

SEQ ID NO: 619 - RNA, 19 nt, synthetic construct
  source 1..19: mol_type = other RNA
acacaaaggacctactaca

SEQ ID NO: 620 - RNA, 19 nt, synthetic construct
  source 1..19: mol_type = other RNA
acacaaaggacctactacn

SEQ ID NO: 621 - RNA, 19 nt, synthetic construct
  source 1..19: mol_type = other RNA
ncacaaaggacctactacn

SEQ ID NO: 622 - RNA, 19 nt, synthetic construct
  source 1..19: mol_type = other RNA
taaccagcttcctgaagtc

SEQ ID NO: 623 - RNA, 19 nt, synthetic construct
  source 1..19: mol_type = other RNA
taaccagcttcctgaagta

SEQ ID NO: 624 - RNA, 19 nt, synthetic construct
  source 1..19: mol_type = other RNA
taaccagcttcctgaagtt

SEQ ID NO: 625 - RNA, 19 nt, synthetic construct
  source 1..19: mol_type = other RNA
taaccagcttcctgaagtn

SEQ ID NO: 626 - RNA, 19 nt, synthetic construct
  source 1..19: mol_type = other RNA
naaccagcttcctgaagtn

SEQ ID NO: 627 - RNA, 19 nt, synthetic construct
  source 1..19: mol_type = other RNA
ccgcctggtgcacttcgag

SEQ ID NO: 628 - RNA, 19 nt, synthetic construct
  source 1..19: mol_type = other RNA
ccgcctggtgcacttcgaa

SEQ ID NO: 629 - RNA, 19 nt, synthetic construct
  source 1..19: mol_type = other RNA
ccgcctggtgcacttcgat

SEQ ID NO: 630 - RNA, 19 nt, synthetic construct
  source 1..19: mol_type = other RNA
ccgcctggtgcacttcgan

SEQ ID NO: 631 - RNA, 19 nt, synthetic construct
  source 1..19: mol_type = other RNA
ncgcctggtgcacttcgan

SEQ ID NO: 632 - RNA, 19 nt, synthetic construct
  source 1..19: mol_type = other RNA
cgcctggtgcacttcgagc

SEQ ID NO: 633 - RNA, 19 nt, synthetic construct
  source 1..19: mol_type = other RNA
cgcctggtgcacttcgaga

SEQ ID NO: 634 - RNA, 19 nt, synthetic construct
  source 1..19: mol_type = other RNA
cgcctggtgcacttcgagt

SEQ ID NO: 635 - RNA, 19 nt, synthetic construct
  source 1..19: mol_type = other RNA
cgcctggtgcacttcgagn

SEQ ID NO: 636 - RNA, 19 nt, synthetic construct
  source 1..19: mol_type = other RNA
ngcctggtgcacttcgagn

SEQ ID NO: 637 - RNA, 19 nt, synthetic construct
  source 1..19: mol_type = other RNA
gcctggtgcacttcgagcc

SEQ ID NO: 638 - RNA, 19 nt, synthetic construct
  source 1..19: mol_type = other RNA
gcctggtgcacttcgagca

SEQ ID NO: 639 - RNA, 19 nt, synthetic construct
  source 1..19: mol_type = other RNA
gcctggtgcacttcgagct

SEQ ID NO: 640 - RNA, 19 nt, synthetic construct
  source 1..19: mol_type = other RNA
gcctggtgcacttcgagcn

SEQ ID NO: 641 - RNA, 19 nt, synthetic construct
  source 1..19: mol_type = other RNA
ncctggtgcacttcgagcn

SEQ ID NO: 642 - RNA, 19 nt, synthetic construct
  source 1..19: mol_type = other RNA
cctggtgcacttcgagcct

SEQ ID NO: 643 - RNA, 19 nt, synthetic construct
  source 1..19: mol_type = other RNA
cctggtgcacttcgagcca

SEQ ID NO: 644 - RNA, 19 nt, synthetic construct
  source 1..19: mol_type = other RNA
cctggtgcacttcgagccn

SEQ ID NO: 645 - RNA, 19 nt, synthetic construct
  source 1..19: mol_type = other RNA
nctggtgcacttcgagccn

SEQ ID NO: 646 - RNA, 19 nt, synthetic construct
  source 1..19: mol_type = other RNA
cgtcctcatcaaatagcag

SEQ ID NO: 647 - RNA, 19 nt, synthetic construct
  source 1..19: mol_type = other RNA
cgtcctcatcaaatagcaa

SEQ ID NO: 648 - RNA, 19 nt, synthetic construct
  source 1..19: mol_type = other RNA
cgtcctcatcaaatagcat

SEQ ID NO: 649 - RNA, 19 nt, synthetic construct
  source 1..19: mol_type = other RNA
cgtcctcatcaaatagcan

SEQ ID NO: 650 - RNA, 19 nt, synthetic construct
  source 1..19: mol_type = other RNA
ngtcctcatcaaatagcan

SEQ ID NO: 651 - RNA, 19 nt, synthetic construct
  source 1..19: mol_type = other RNA
tcaaatagcagacttgttc

SEQ ID NO: 652 - RNA, 19 nt, synthetic construct
  source 1..19: mol_type = other RNA
tcaaatagcagacttgtta

SEQ ID NO: 653 - RNA, 19 nt, synthetic construct
  source 1..19: mol_type = other RNA
tcaaatagcagacttgttt

SEQ ID NO: 654 - RNA, 19 nt, synthetic construct
  source 1..19: mol_type = other RNA
tcaaatagcagacttgttn

SEQ ID NO: 655 - RNA, 19 nt, synthetic construct
  source 1..19: mol_type = other RNA
ncaaatagcagacttgttn

SEQ ID NO: 656 - RNA, 19 nt, synthetic construct
  source 1..19: mol_type = other RNA
caaatagcagacttgttcc

SEQ ID NO: 657 - RNA, 19 nt, synthetic construct
  source 1..19: mol_type = other RNA
caaatagcagacttgttca

SEQ ID NO: 658 - RNA, 19 nt, synthetic construct
  source 1..19: mol_type = other RNA
caaatagcagacttgttct

SEQ ID NO: 659 - RNA, 19 nt, synthetic construct
  source 1..19: mol_type = other RNA
caaatagcagacttgttcn

SEQ ID NO: 660 - RNA, 19 nt, synthetic construct
  source 1..19: mol_type = other RNA
naaatagcagacttgttcn

SEQ ID NO: 661 - RNA, 19 nt, synthetic construct
  source 1..19: mol_type = other RNA
aaatagcagacttgttccg

SEQ ID NO: 662 - RNA, 19 nt, synthetic construct
  source 1..19: mol_type = other RNA
aaatagcagacttgttcca

SEQ ID NO: 663 - RNA, 19 nt, synthetic construct
  source 1..19: mol_type = other RNA
aaatagcagacttgttcct

SEQ ID NO: 664 - RNA, 19 nt, synthetic construct
  source 1..19: mol_type = other RNA
aaatagcagacttgttccn

SEQ ID NO: 665 - RNA, 19 nt, synthetic construct
  source 1..19: mol_type = other RNA
naatagcagacttgttccn

SEQ ID NO: 666 - RNA, 19 nt, synthetic construct
  source 1..19: mol_type = other RNA
ggaccagattgcttactca

SEQ ID NO: 667 - RNA, 19 nt, synthetic construct
  source 1..19: mol_type = other RNA
ggaccagattgcttactct

SEQ ID NO: 668 - RNA, 19 nt, synthetic construct
  source 1..19: mol_type = other RNA
ggaccagattgcttactcn

SEQ ID NO: 669 - RNA, 19 nt, synthetic construct
  source 1..19: mol_type = other RNA
ngaccagattgcttactcn

SEQ ID NO: 670 - RNA, 19 nt, synthetic construct
  source 1..19: mol_type = other RNA
cagattgcttactcagaca

SEQ ID NO: 671 - RNA, 19 nt, synthetic construct
  source 1..19: mol_type = other RNA
cagattgcttactcagact

SEQ ID NO: 672 - RNA, 19 nt, synthetic construct
  source 1..19: mol_type = other RNA
cagattgcttactcagacn

SEQ ID NO: 673 - RNA, 19 nt, synthetic construct
  source 1..19: mol_type = other RNA
nagattgcttactcagacn

SEQ ID NO: 674 - RNA, 19 nt, synthetic construct
  source 1..19: mol_type = other RNA
ttgcttactcagacaccag

SEQ ID NO: 675 - RNA, 19 nt, synthetic construct
  source 1..19: mol_type = other RNA
ttgcttactcagacaccaa

SEQ ID NO: 676 - RNA, 19 nt, synthetic construct
  source 1..19: mol_type = other RNA
ttgcttactcagacaccat

SEQ ID NO: 677 - RNA, 19 nt, synthetic construct
  source 1..19: mol_type = other RNA
ttgcttactcagacaccan

SEQ ID NO: 678 - RNA, 19 nt, synthetic construct
  source 1..19: mol_type = other RNA
ntgcttactcagacaccan

SEQ ID NO: 679 - RNA, 19 nt, synthetic construct
  source 1..19: mol_type = other RNA
ggctagagaagaaagttaa

SEQ ID NO: 680 - RNA, 19 nt, synthetic construct
  source 1..19: mol_type = other RNA
ggctagagaagaaagttat

SEQ ID NO: 681 - RNA, 19 nt, synthetic construct
  source 1..19: mol_type = other RNA
ggctagagaagaaagttan

SEQ ID NO: 682 - RNA, 19 nt, synthetic construct
  source 1..19: mol_type = other RNA
ngctagagaagaaagttan

SEQ ID NO: 683 - RNA, 19 nt, synthetic construct
  source 1..19: mol_type = other RNA
agagaagaaagttaaagca

SEQ ID NO: 684 - RNA, 19 nt, synthetic construct
  source 1..19: mol_type = other RNA
agagaagaaagttaaagct

SEQ ID NO: 685 - RNA, 19 nt, synthetic construct
  source 1..19: mol_type = other RNA
agagaagaaagttaaagcn

SEQ ID NO: 686 - RNA, 19 nt, synthetic construct
  source 1..19: mol_type = other RNA
ngagaagaaagttaaagcn

SEQ ID NO: 687 - RNA, 19 nt, synthetic construct
  source 1..19: mol_type = other RNA
agaagaaagttaaagcaac

SEQ ID NO: 688 - RNA, 19 nt, synthetic construct
  source 1..19: mol_type = other RNA
agaagaaagttaaagcaaa

SEQ ID NO: 689 - RNA, 19 nt, synthetic construct
  source 1..19: mol_type = other RNA
agaagaaagttaaagcaat

SEQ ID NO: 690 - RNA, 19 nt, synthetic construct
  source 1..19: mol_type = other RNA
agaagaaagttaaagcaan

SEQ ID NO: 691 - RNA, 19 nt, synthetic construct
  source 1..19: mol_type = other RNA
ngaagaaagttaaagcaan

SEQ ID NO: 692 - RNA, 19 nt, synthetic construct
  source 1..19: mol_type = other RNA
gcccaatattgtaatttca

SEQ ID NO: 693 - RNA, 19 nt, synthetic construct
  source 1..19: mol_type = other RNA
gcccaatattgtaatttct

SEQ ID NO: 694 - RNA, 19 nt, synthetic construct
  source 1..19: mol_type = other RNA
gcccaatattgtaatttcn

SEQ ID NO: 695 - RNA, 19 nt, synthetic construct
  source 1..19: mol_type = other RNA
ncccaatattgtaatttcn

SEQ ID NO: 696 - RNA, 19 nt, synthetic construct
  source 1..19: mol_type = other RNA
caggatgcgatgtctatgc

SEQ ID NO: 697 - RNA, 19 nt, synthetic construct
  source 1..19: mol_type = other RNA
caggatgcgatgtctatga

SEQ ID NO: 698 - RNA, 19 nt, synthetic construct
  source 1..19: mol_type = other RNA
caggatgcgatgtctatgt

SEQ ID NO: 699 - RNA, 19 nt, synthetic construct
  source 1..19: mol_type = other RNA
caggatgcgatgtctatgn

SEQ ID NO: 700 - RNA, 19 nt, synthetic construct
  source 1..19: mol_type = other RNA
naggatgcgatgtctatgn

SEQ ID NO: 701 - RNA, 19 nt, synthetic construct
  source 1..19: mol_type = other RNA
tccagatgcattttaacca

SEQ ID NO: 702 - RNA, 19 nt, synthetic construct
  source 1..19: mol_type = other RNA
tccagatgcattttaacct

SEQ ID NO: 703 - RNA, 19 nt, synthetic construct
  source 1..19: mol_type = other RNA
tccagatgcattttaaccn

SEQ ID NO: 704 - RNA, 19 nt, synthetic construct
  source 1..19: mol_type = other RNA
nccagatgcattttaaccn

SEQ ID NO: 705 - RNA, 19 nt, synthetic construct
  source 1..19: mol_type = other RNA
ctggaaacactgaagagtt

SEQ ID NO: 706 - RNA, 19 nt, synthetic construct
  source 1..19: mol_type = other RNA
ctggaaacactgaagagta

SEQ ID NO: 707 - RNA, 19 nt, synthetic construct
  source 1..19: mol_type = other RNA
ctggaaacactgaagagtn

SEQ ID NO: 708 - RNA, 19 nt, synthetic construct
  source 1..19: mol_type = other RNA
ntggaaacactgaagagtn

SEQ ID NO: 709 - RNA, 19 nt, synthetic construct
  source 1..19: mol_type = other RNA
acccttcagaacgaaagtt

SEQ ID NO: 710 - RNA, 19 nt, synthetic construct
  source 1..19: mol_type = other RNA
acccttcagaacgaaagta

SEQ ID NO: 711 - RNA, 19 nt, synthetic construct
  source 1..19: mol_type = other RNA
acccttcagaacgaaagtn

SEQ ID NO: 712 - RNA, 19 nt, synthetic construct
  source 1..19: mol_type = other RNA
ncccttcagaacgaaagtn

SEQ ID NO: 713 - RNA, 19 nt, synthetic construct
  source 1..19: mol_type = other RNA
cccttcagaacgaaagtta

SEQ ID NO: 714 - RNA, 19 nt, synthetic construct
  source 1..19: mol_type = other RNA
cccttcagaacgaaagttt

SEQ ID NO: 715 - RNA, 19 nt, synthetic construct
  source 1..19: mol_type = other RNA
cccttcagaacgaaagttn

SEQ ID NO: 716 - RNA, 19 nt, synthetic construct
  source 1..19: mol_type = other RNA
nccttcagaacgaaagttn

SEQ ID NO: 717 - RNA, 19 nt, synthetic construct
  source 1..19: mol_type = other RNA
cagaacgaaagttatatgg

SEQ ID NO: 718 - RNA, 19 nt, synthetic construct
  source 1..19: mol_type = other RNA
cagaacgaaagttatatga

SEQ ID NO: 719 - RNA, 19 nt, synthetic construct
  source 1..19: mol_type = other RNA
cagaacgaaagttatatgt

SEQ ID NO: 720 - RNA, 19 nt, synthetic construct
  source 1..19: mol_type = other RNA
cagaacgaaagttatatgn

SEQ ID NO: 721 - RNA, 19 nt, synthetic construct
  source 1..19: mol_type = other RNA
nagaacgaaagttatatgn

SEQ ID NO: 722 - RNA, 19 nt, synthetic construct
  source 1..19: mol_type = other RNA
gaacgaaagttatatggaa

SEQ ID NO: 723 - RNA, 19 nt, synthetic construct
  source 1..19: mol_type = other RNA
gaacgaaagttatatggat

SEQ ID NO: 724 - RNA, 19 nt, synthetic construct
  source 1..19: mol_type = other RNA
gaacgaaagttatatggan

SEQ ID NO: 725 - RNA, 19 nt, synthetic construct
  source 1..19: mol_type = other RNA
naacgaaagttatatggan

SEQ ID NO: 726 - RNA, 19 nt, synthetic construct
  source 1..19: mol_type = other RNA
aaagttatatggaaaatca

SEQ ID NO: 727 - RNA, 19 nt, synthetic construct
  source 1..19: mol_type = other RNA
aaagttatatggaaaatct

SEQ ID NO: 728 - RNA, 19 nt, synthetic construct
  source 1..19: mol_type = other RNA
aaagttatatggaaaatcn

SEQ ID NO: 729 - RNA, 19 nt, synthetic construct
  source 1..19: mol_type = other RNA
naagttatatggaaaatcn

SEQ ID NO: 730 - RNA, 19 nt, synthetic construct
  source 1..19: mol_type = other RNA
tggaaaatcaccactcttt

SEQ ID NO: 731 - RNA, 19 nt, synthetic construct
  source 1..19: mol_type = other RNA
tggaaaatcaccactctta

SEQ ID NO: 732 - RNA, 19 nt, synthetic construct
  source 1..19: mol_type = other RNA
tggaaaatcaccactcttn

SEQ ID NO: 733 - RNA, 19 nt, synthetic construct
  source 1..19: mol_type = other RNA
nggaaaatcaccactcttn

SEQ ID NO: 734 - RNA, 19 nt, synthetic construct
  source 1..19: mol_type = other RNA
gaaaatcaccactctttgg

SEQ ID NO: 735 - RNA, 19 nt, synthetic construct
  source 1..19: mol_type = other RNA
gaaaatcaccactctttga

SEQ ID NO: 736 - RNA, 19 nt, synthetic construct
  source 1..19: mol_type = other RNA
gaaaatcaccactctttgt

SEQ ID NO: 737 - RNA, 19 nt, synthetic construct
  source 1..19: mol_type = other RNA
gaaaatcaccactctttgn

SEQ ID NO: 738 - RNA, 19 nt, synthetic construct
  source 1..19: mol_type = other RNA
naaaatcaccactctttgn

SEQ ID NO: 739 - RNA, 19 nt, synthetic construct
  source 1..19: mol_type = other RNA
caaagtgggagaccctgtg

SEQ ID NO: 740 - RNA, 19 nt, synthetic construct
  source 1..19: mol_type = other RNA
caaagtgggagaccctgta

SEQ ID NO: 741 - RNA, 19 nt, synthetic construct
  source 1..19: mol_type = other RNA
caaagtgggagaccctgtt

SEQ ID NO: 742 - RNA, 19 nt, synthetic construct
  source 1..19: mol_type = other RNA
caaagtgggagaccctgtn

SEQ ID NO: 743 - RNA, 19 nt, synthetic construct
  source 1..19: mol_type = other RNA
naaagtgggagaccctgtn

SEQ ID NO: 744 - RNA, 19 nt, synthetic construct
  source 1..19: mol_type = other RNA
aaagtgggagaccctgtgt

SEQ ID NO: 745 - RNA, 19 nt, synthetic construct
  source 1..19: mol_type = other RNA
aaagtgggagaccctgtga

SEQ ID NO: 746 - RNA, 19 nt, synthetic construct
  source 1..19: mol_type = other RNA
aaagtgggagaccctgtgn

SEQ ID NO: 747 - RNA, 19 nt, synthetic construct
  source 1..19: mol_type = other RNA
naagtgggagaccctgtgn

SEQ ID NO: 748 - RNA, 19 nt, synthetic construct
  source 1..19: mol_type = other RNA
gtgggagaccctgtgtacc

SEQ ID NO: 749 - RNA, 19 nt, synthetic construct
  source 1..19: mol_type = other RNA
gtgggagaccctgtgtaca

SEQ ID NO: 750 - RNA, 19 nt, synthetic construct
  source 1..19: mol_type = other RNA
gtgggagaccctgtgtact

SEQ ID NO: 751 - RNA, 19 nt, synthetic construct
  source 1..19: mol_type = other RNA
gtgggagaccctgtgtacn

SEQ ID NO: 752 - RNA, 19 nt, synthetic construct
  source 1..19: mol_type = other RNA
ntgggagaccctgtgtacn

SEQ ID NO: 753 - RNA, 19 nt, synthetic construct
  source 1..19: mol_type = other RNA
tgggagaccctgtgtacct

SEQ ID NO: 754 - RNA, 19 nt, synthetic construct
  source 1..19: mol_type = other RNA
tgggagaccctgtgtacca

SEQ ID NO: 755 - RNA, 19 nt, synthetic construct
  source 1..19: mol_type = other RNA
tgggagaccctgtgtaccn

SEQ ID NO: 756 - RNA, 19 nt, synthetic construct
  source 1..19: mol_type = other RNA
ngggagaccctgtgtaccn

SEQ ID NO: 757 - RNA, 19 nt, synthetic construct
  source 1..19: mol_type = other RNA
gggagaccctgtgtacctg

SEQ ID NO: 758 - RNA, 19 nt, synthetic construct
  source 1..19: mol_type = other RNA
gggagaccctgtgtaccta

SEQ ID NO: 759 - RNA, 19 nt, synthetic construct
  source 1..19: mol_type = other RNA
gggagaccctgtgtacctt

SEQ ID NO: 760 - RNA, 19 nt, synthetic construct
  source 1..19: mol_type = other RNA
gggagaccctgtgtacctn

SEQ ID NO: 761 - RNA, 19 nt, synthetic construct
  source 1..19: mol_type = other RNA
nggagaccctgtgtacctn

SEQ ID NO: 762 - RNA, 19 nt, synthetic construct
  source 1..19: mol_type = other RNA
gtcctggaatattagatgc

SEQ ID NO: 763 - RNA, 19 nt, synthetic construct
  source 1..19: mol_type = other RNA
gtcctggaatattagatga

SEQ ID NO: 764 - RNA, 19 nt, synthetic construct
  source 1..19: mol_type = other RNA
gtcctggaatattagatgt

SEQ ID NO: 765 - RNA, 19 nt, synthetic construct
  source 1..19: mol_type = other RNA
gtcctggaatattagatgn

SEQ ID NO: 766 - RNA, 19 nt, synthetic construct
  source 1..19: mol_type = other RNA
ntcctggaatattagatgn

SEQ ID NO: 767 - RNA, 19 nt, synthetic construct
  source 1..19: mol_type = other RNA
tcctggaatattagatgcc

SEQ ID NO: 768 - RNA, 19 nt, synthetic construct
  source 1..19: mol_type = other RNA
tcctggaatattagatgct

SEQ ID NO: 769 - RNA, 19 nt, synthetic construct
  source 1..19: mol_type = other RNA
tcctggaatattagatgca

SEQ ID NO: 770 - RNA, 19 nt, synthetic construct
  source 1..19: mol_type = other RNA
tcctggaatattagatgcn

SEQ ID NO: 771 - RNA, 19 nt, synthetic construct
  source 1..19: mol_type = other RNA
ncctggaatattagatgcn

SEQ ID NO: 772 - RNA, 19 nt, synthetic construct
  source 1..19: mol_type = other RNA
cctggaatattagatgcct

SEQ ID NO: 773 - RNA, 19 nt, synthetic construct
  source 1..19: mol_type = other RNA
cctggaatattagatgcca

SEQ ID NO: 774 - RNA, 19 nt, synthetic construct
  source 1..19: mol_type = other RNA
cctggaatattagatgccn

SEQ ID NO: 775 - RNA, 19 nt, synthetic construct
  source 1..19: mol_type = other RNA
nctggaatattagatgccn

SEQ ID NO: 776 - RNA, 19 nt, synthetic construct
  source 1..19: mol_type = other RNA
ctggaatattagatgcctt

SEQ ID NO: 777 - RNA, 19 nt, synthetic construct
  source 1..19: mol_type = other RNA
ctggaatattagatgccta

SEQ ID NO: 778 - RNA, 19 nt, synthetic construct
  source 1..19: mol_type = other RNA
ctggaatattagatgcctn

SEQ ID NO: 779 - RNA, 19 nt, synthetic construct
  source 1..19: mol_type = other RNA
ntggaatattagatgcctn

SEQ ID NO: 780 - RNA, 19 nt, synthetic construct
  source 1..19: mol_type = other RNA
tctcaaaaatgacaacact

SEQ ID NO: 781 - RNA, 19 nt, synthetic construct
  source 1..19: mol_type = other RNA
tctcaaaaatgacaacaca

SEQ ID NO: 782 - RNA, 19 nt, synthetic construct
  source 1..19: mol_type = other RNA
tctcaaaaatgacaacacn

SEQ ID NO: 783 - RNA, 19 nt, synthetic construct
  source 1..19: mol_type = other RNA
nctcaaaaatgacaacacn

SEQ ID NO: 784 - RNA, 19 nt, synthetic construct
  source 1..19: mol_type = other RNA
tgacaacacttgaagcatg

SEQ ID NO: 785 - RNA, 19 nt, synthetic construct
  source 1..19: mol_type = other RNA
tgacaacacttgaagcata

SEQ ID NO: 786 - RNA, 19 nt, synthetic construct
  source 1..19: mol_type = other RNA
tgacaacacttgaagcatt

SEQ ID NO: 787 - RNA, 19 nt, synthetic construct
  source 1..19: mol_type = other RNA
tgacaacacttgaagcatn

SEQ ID NO: 788 - RNA, 19 nt, synthetic construct
  source 1..19: mol_type = other RNA
ngacaacacttgaagcatn

SEQ ID NO: 789 - RNA, 19 nt, synthetic construct
  source 1..19: mol_type = other RNA
aacacttgaagcatggtgt

SEQ ID NO: 790 - RNA, 19 nt, synthetic construct
  source 1..19: mol_type = other RNA
aacacttgaagcatggtga

SEQ ID NO: 791 - RNA, 19 nt, synthetic construct
  source 1..19: mol_type = other RNA
aacacttgaagcatggtgn

SEQ ID NO: 792 - RNA, 19 nt, synthetic construct
  source 1..19: mol_type = other RNA
aacacttgaagcatggtgn

SEQ ID NO: 793 - RNA, 19 nt, synthetic construct
  source 1..19: mol_type = other RNA
gaagcatggtgtttcagaa

SEQ ID NO: 794 - RNA, 19 nt, synthetic construct
  source 1..19: mol_type = other RNA
gaagcatggtgtttcagat

SEQ ID NO: 795 - RNA, 19 nt, synthetic construct
  source 1..19: mol_type = other RNA
gaagcatggtgtttcagan

SEQ ID NO: 796 - RNA, 19 nt, synthetic construct
  source 1..19: mol_type = other RNA
naagcatggtgtttcagan

SEQ ID NO: 797 - RNA, 19 nt, synthetic construct
  source 1..19: mol_type = other RNA
agcatggtgtttcagaact

SEQ ID NO: 798 - RNA, 19 nt, synthetic construct
  source 1..19: mol_type = other RNA
agcatggtgtttcagaaca

SEQ ID NO: 799 - RNA, 19 nt, synthetic construct
  source 1..19: mol_type = other RNA
agcatggtgtttcagaacn

SEQ ID NO: 800 - RNA, 19 nt, synthetic construct
  source 1..19: mol_type = other RNA
ngcatggtgtttcagaacn

SEQ ID NO: 801 - RNA, 19 nt, synthetic construct
  source 1..19: mol_type = other RNA
agaactgagacctctacat

SEQ ID NO: 802 - RNA, 19 nt, synthetic construct
  source 1..19: mol_type = other RNA
agaactgagacctctacaa

SEQ ID NO: 803 - RNA, 19 nt, synthetic construct
  source 1..19: mol_type = other RNA
agaactgagacctctacan

SEQ ID NO: 804 - RNA, 19 nt, synthetic construct
  source 1..19: mol_type = other RNA
ngaactgagacctctacan

SEQ ID NO: 805 - RNA, 19 nt, synthetic construct
  source 1..19: mol_type = other RNA
agacctctacattttcttt

SEQ ID NO: 806 - RNA, 19 nt, synthetic construct
  source 1..19: mol_type = other RNA
agacctctacattttctta

SEQ ID NO: 807 - RNA, 19 nt, synthetic construct
  source 1..19: mol_type = other RNA
agacctctacattttcttn

SEQ ID NO: 808 - RNA, 19 nt, synthetic construct
  source 1..19: mol_type = other RNA
ngacctctacattttcttn

SEQ ID NO: 809 - RNA, 19 nt, synthetic construct
  source 1..19: mol_type = other RNA
tgattttcacatttttcgt

SEQ ID NO: 810 - RNA, 19 nt, synthetic construct
  source 1..19: mol_type = other RNA
tgattttcacatttttcga

SEQ ID NO: 811 - RNA, 19 nt, synthetic construct
  source 1..19: mol_type = other RNA
tgattttcacatttttcgn

SEQ ID NO: 812 - RNA, 19 nt, synthetic construct
  source 1..19: mol_type = other RNA
ngattttcacatttttcgn

SEQ ID NO: 813 - RNA, 19 nt, synthetic construct
  source 1..19: mol_type = other RNA
gtgtctcaatgcttcaatg

SEQ ID NO: 814 - RNA, 19 nt, synthetic construct
  source 1..19: mol_type = other RNA
gtgtctcaatgcttcaata

SEQ ID NO: 815 - RNA, 19 nt, synthetic construct
  source 1..19: mol_type = other RNA
gtgtctcaatgcttcaatt

SEQ ID NO: 816 - RNA, 19 nt, synthetic construct
  source 1..19: mol_type = other RNA
gtgtctcaatgcttcaatn

SEQ ID NO: 817 - RNA, 19 nt, synthetic construct
  source 1..19: mol_type = other RNA
ntgtctcaatgcttcaatn

SEQ ID NO: 818 - RNA, 19 nt, synthetic construct
  source 1..19: mol_type = other RNA
tctcaatgcttcaatgtcc

SEQ ID NO: 819 - RNA, 19 nt, synthetic construct
  source 1..19: mol_type = other RNA
tctcaatgcttcaatgtca

SEQ ID NO: 820 - RNA, 19 nt, synthetic construct
  source 1..19: mol_type = other RNA
tctcaatgcttcaatgtct

SEQ ID NO: 821 - RNA, 19 nt, synthetic construct
  source 1..19: mol_type = other RNA
tctcaatgcttcaatgtcn

SEQ ID NO: 822 - RNA, 19 nt, synthetic construct
  source 1..19: mol_type = other RNA
nctcaatgcttcaatgtcn

SEQ ID NO: 823 - RNA, 19 nt, synthetic construct
  source 1..19: mol_type = other RNA
cttagtaggacttcagtaa

SEQ ID NO: 824 - RNA, 19 nt, synthetic construct
  source 1..19: mol_type = other RNA
cttagtaggacttcagtat

SEQ ID NO: 825 - RNA, 19 nt, synthetic construct
  source 1..19: mol_type = other RNA
cttagtaggacttcagtan

SEQ ID NO: 826 - RNA, 19 nt, synthetic construct
  source 1..19: mol_type = other RNA
nttagtaggacttcagtan

SEQ ID NO: 827 - RNA, 19 nt, synthetic construct
  source 1..19: mol_type = other RNA
atgacaagacaggattctg

SEQ ID NO: 828 - RNA, 19 nt, synthetic construct
  source 1..19: mol_type = other RNA
atgacaagacaggattcta

SEQ ID NO: 829 - RNA, 19 nt, synthetic construct
  source 1..19: mol_type = other RNA
atgacaagacaggattctt

SEQ ID NO: 830 - RNA, 19 nt, synthetic construct
  source 1..19: mol_type = other RNA
atgacaagacaggattctn

SEQ ID NO: 831 - RNA, 19 nt, synthetic construct
  source 1..19: mol_type = other RNA
ntgacaagacaggattctn

SEQ ID NO: 832 - RNA, 19 nt, synthetic construct
  source 1..19: mol_type = other RNA
tgacaagacaggattctga

SEQ ID NO: 833 - RNA, 19 nt, synthetic construct
  source 1..19: mol_type = other RNA
tgacaagacaggattctgt

SEQ ID NO: 834 - RNA, 19 nt, synthetic construct
  source 1..19: mol_type = other RNA
tgacaagacaggattctgn

SEQ ID NO: 835 - RNA, 19 nt, synthetic construct
  source 1..19: mol_type = other RNA
ngacaagacaggattctgn

SEQ ID NO: 836 - RNA, 19 nt, synthetic construct
  source 1..19: mol_type = other RNA
gacaagacaggattctgaa

SEQ ID NO: 837 - RNA, 19 nt, synthetic construct
  source 1..19: mol_type = other RNA
gacaagacaggattctgat

SEQ ID NO: 838 - RNA, 19 nt, synthetic construct
  source 1..19: mol_type = other RNA
gacaagacaggattctgan

SEQ ID NO: 839 - RNA, 19 nt, synthetic construct
  source 1..19: mol_type = other RNA
nacaagacaggattctgan

SEQ ID NO: 840 - RNA, 19 nt, synthetic construct
  source 1..19: mol_type = other RNA
acaggattctgaaaactcc

SEQ ID NO: 841 - RNA, 19 nt, synthetic construct
  source 1..19: mol_type = other RNA
acaggattctgaaaactca

SEQ ID NO: 842 - RNA, 19 nt, synthetic construct
  source 1..19: mol_type = other RNA
acaggattctgaaaactct

SEQ ID NO: 843 - RNA, 19 nt, synthetic construct
  source 1..19: mol_type = other RNA
acaggattctgaaaactcn

SEQ ID NO: 844 - RNA, 19 nt, synthetic construct
  source 1..19: mol_type = other RNA
ncaggattctgaaaactcn

SEQ ID NO: 845 - RNA, 19 nt, synthetic construct
  source 1..19: mol_type = other RNA
cgtttaactgattatggaa

SEQ ID NO: 846 - RNA, 19 nt, synthetic construct
  source 1..19: mol_type = other RNA
cgtttaactgattatggat

SEQ ID NO: 847 - RNA, 19 nt, synthetic construct
  source 1..19: mol_type = other RNA
cgtttaactgattatggan

SEQ ID NO: 848 - RNA, 19 nt, synthetic construct
  source 1..19: mol_type = other RNA
ngtttaactgattatggan

SEQ ID NO: 849 - RNA, 19 nt, synthetic construct
  source 1..19: mol_type = other RNA
tgattatggaatagttctt

SEQ ID NO: 850 - RNA, 19 nt, synthetic construct
  source 1..19: mol_type = other RNA
tgattatggaatagttcta

SEQ ID NO: 851 - RNA, 19 nt, synthetic construct
  source 1..19: mol_type = other RNA
tgattatggaatagttctn

SEQ ID NO: 852 - RNA, 19 nt, synthetic construct
  source 1..19: mol_type = other RNA
ngattatggaatagttctn

SEQ ID NO: 853 - RNA, 19 nt, synthetic construct
  source 1..19: mol_type = other RNA
ttatggaatagttctttct

SEQ ID NO: 854 - RNA, 19 nt, synthetic construct
  source 1..19: mol_type = other RNA
ttatggaatagttctttca

SEQ ID NO: 855 - RNA, 19 nt, synthetic construct
  source 1..19: mol_type = other RNA
ttatggaatagttctttcn

SEQ ID NO: 856 - RNA, 19 nt, synthetic construct
  source 1..19: mol_type = other RNA
ntatggaatagttctttcn

SEQ ID NO: 857 - RNA, 19 nt, synthetic construct
  source 1..19: mol_type = other RNA
tatggaatagttctttctc

SEQ ID NO: 858 - RNA, 19 nt, synthetic construct
  source 1..19: mol_type = other RNA
tatggaatagttctttcta

SEQ ID NO: 859 - RNA, 19 nt, synthetic construct
  source 1..19: mol_type = other RNA
tatggaatagttctttctt

SEQ ID NO: 860 - RNA, 19 nt, synthetic construct
  source 1..19: mol_type = other RNA
tatggaatagttctttctn

SEQ ID NO: 861 - RNA, 19 nt, synthetic construct
  source 1..19: mol_type = other RNA
natggaatagttctttctn

SEQ ID NO: 862 - RNA, 19 nt, synthetic construct
  source 1..19: mol_type = other RNA
cctgcttctccgtttatct

SEQ ID NO: 863 - RNA, 19 nt, synthetic construct
  source 1..19: mol_type = other RNA
cctgcttctccgtttatca

SEQ ID NO: 864 - RNA, 19 nt, synthetic construct
  source 1..19: mol_type = other RNA
cctgcttctccgtttatcn

SEQ ID NO: 865 - RNA, 19 nt, synthetic construct
  source 1..19: mol_type = other RNA
nctgcttctccgtttatcn

SEQ ID NO: 866 - RNA, 19 nt, synthetic construct
  source 1..19: mol_type = other RNA
gaagaatatcctagaatgt

SEQ ID NO: 867 - RNA, 19 nt, synthetic construct
  source 1..19: mol_type = other RNA
gaagaatatcctagaatga

SEQ ID NO: 868 - RNA, 19 nt, synthetic construct
  source 1..19: mol_type = other RNA
gaagaatatcctagaatgn

SEQ ID NO: 869 - RNA, 19 nt, synthetic construct
  source 1..19: mol_type = other RNA
naagaatatcctagaatgn

SEQ ID NO: 870 - RNA, 19 nt, synthetic construct
  source 1..19: mol_type = other RNA
tttccatagatctggatct

SEQ ID NO: 871 - RNA, 19 nt, synthetic construct
  source 1..19: mol_type = other RNA
tttccatagatctggatca

SEQ ID NO: 872 - RNA, 19 nt, synthetic construct
  source 1..19: mol_type = other RNA
tttccatagatctggatcn

SEQ ID NO: 873 - RNA, 19 nt, synthetic construct
  source 1..19: mol_type = other RNA
nttccatagatctggatcn

SEQ ID NO: 874 - RNA, 19 nt, synthetic construct
  source 1..19: mol_type = other RNA
gcttctcagacagcattgg

SEQ ID NO: 875 - RNA, 19 nt, synthetic construct
  source 1..19: mol_type = other RNA
gcttctcagacagcattga

SEQ ID NO: 876 - RNA, 19 nt, synthetic construct
  source 1..19: mol_type = other RNA
gcttctcagacagcattgt

SEQ ID NO: 877 - RNA, 19 nt, synthetic construct
  source 1..19: mol_type = other RNA
gcttctcagacagcattgn

SEQ ID NO: 878 - RNA, 19 nt, synthetic construct
  source 1..19: mol_type = other RNA
ncttctcagacagcattgn

SEQ ID NO: 879 - RNA, 19 nt, synthetic construct
  source 1..19: mol_type = other RNA
ttctcagacagcattggat

SEQ ID NO: 880 - RNA, 19 nt, synthetic construct
  source 1..19: mol_type = other RNA
ttctcagacagcattggaa

SEQ ID NO: 881 - RNA, 19 nt, synthetic construct
  source 1..19: mol_type = other RNA
ttctcagacagcattggan

SEQ ID NO: 882 - RNA, 19 nt, synthetic construct
  source 1..19: mol_type = other RNA
ntctcagacagcattggan

SEQ ID NO: 883 - RNA, 19 nt, synthetic construct
  source 1..19: mol_type = other RNA
acagcattggatttcctaa

SEQ ID NO: 884 - RNA, 19 nt, synthetic construct
  source 1..19: mol_type = other RNA
acagcattggatttcctat

SEQ ID NO: 885 - RNA, 19 nt, synthetic construct
  source 1..19: mol_type = other RNA
acagcattggatttcctan

SEQ ID NO: 886 - RNA, 19 nt, synthetic construct
  source 1..19: mol_type = other RNA
ncagcattggatttcctan

SEQ ID NO: 887 - RNA, 19 nt, synthetic construct
  source 1..19: mol_type = other RNA
cattggatttcctaaaggt

SEQ ID NO: 888 - RNA, 19 nt, synthetic construct
  source 1..19: mol_type = other RNA
cattggatttcctaaagga

SEQ ID NO: 889 - RNA, 19 nt, synthetic construct
  source 1..19: mol_type = other RNA
cattggatttcctaaaggn

SEQ ID NO: 890 - RNA, 19 nt, synthetic construct
  source 1..19: mol_type = other RNA
nattggatttcctaaaggn

SEQ ID NO: 891 - RNA, 19 nt, synthetic construct
  source 1..19: mol_type = other RNA
ttggatttcctaaaggtgc

SEQ ID NO: 892 - RNA, 19 nt, synthetic construct
  source 1..19: mol_type = other RNA
ttggatttcctaaaggtga

SEQ ID NO: 893 - RNA, 19 nt, synthetic construct
  source 1..19: mol_type = other RNA
ttggatttcctaaaggtgt

SEQ ID NO: 894 - RNA, 19 nt, synthetic construct
  source 1..19: mol_type = other RNA
ttggatttcctaaaggtgn

SEQ ID NO: 895 - RNA, 19 nt, synthetic construct
  source 1..19: mol_type = other RNA
ntggatttcctaaaggtgn

SEQ ID NO: 896 - RNA, 19 nt, synthetic construct
  source 1..19: mol_type = other RNA
actgaaaacctttaaaggg

SEQ ID NO: 897 - RNA, 19 nt, synthetic construct
  source 1..19: mol_type = other RNA
actgaaaacctttaaagga

SEQ ID NO: 898 - RNA, 19 nt, synthetic construct
  source 1..19: mol_type = other RNA
actgaaaacctttaaaggt

SEQ ID NO: 899 - RNA, 19 nt, synthetic construct
  source 1..19: mol_type = other RNA
actgaaaacctttaaaggn

SEQ ID NO: 900 - RNA, 19 nt, synthetic construct
  source 1..19: mol_type = other RNA
nctgaaaacctttaaaggn

SEQ ID NO: 901 - RNA, 19 nt, synthetic construct
  source 1..19: mol_type = other RNA
ggaaagcatatgtcagttg

SEQ ID NO: 902 - RNA, 19 nt, synthetic construct
  source 1..19: mol_type = other RNA
ggaaagcatatgtcagtta

SEQ ID NO: 903 - RNA, 19 nt, synthetic construct
  source 1..19: mol_type = other RNA
ggaaagcatatgtcagttt

SEQ ID NO: 904 - RNA, 19 nt, synthetic construct
  source 1..19: mol_type = other RNA
ggaaagcatatgtcagttn

SEQ ID NO: 905 - RNA, 19 nt, synthetic construct
  source 1..19: mol_type = other RNA
ngaaagcatatgtcagttn

SEQ ID NO: 906 - RNA, 19 nt, synthetic construct
  source 1..19: mol_type = other RNA
tgtcagttgtttaaaaccc

SEQ ID NO: 907 - RNA, 19 nt, synthetic construct
  source 1..19: mol_type = other RNA
tgtcagttgtttaaaacca

SEQ ID NO: 908 - RNA, 19 nt, synthetic construct
  source 1..19: mol_type = other RNA
tgtcagttgtttaaaacct

SEQ ID NO: 909 - RNA, 19 nt, synthetic construct
  source 1..19: mol_type = other RNA
tgtcagttgtttaaaaccn

SEQ ID NO: 910 - RNA, 19 nt, synthetic construct
  source 1..19: mol_type = other RNA
ngtcagttgtttaaaaccn

SEQ ID NO: 911 - RNA, 19 nt, synthetic construct
  source 1..19: mol_type = other RNA
aactctaagatctgatgaa

SEQ ID NO: 912 - RNA, 19 nt, synthetic construct
  source 1..19: mol_type = other RNA
aactctaagatctgatgat

SEQ ID NO: 913 - RNA, 19 nt, synthetic construct
  source 1..19: mol_type = other RNA
aactctaagatctgatgan

SEQ ID NO: 914 - RNA, 19 nt, synthetic construct
  source 1..19: mol_type = other RNA
nactctaagatctgatgan

SEQ ID NO: 915 - RNA, 19 nt, synthetic construct
  source 1..19: mol_type = other RNA
actctaagatctgatgaag

SEQ ID NO: 916 - RNA, 19 nt, synthetic construct
  source 1..19: mol_type = other RNA
actctaagatctgatgaaa

SEQ ID NO: 917 - RNA, 19 nt, synthetic construct
  source 1..19: mol_type = other RNA
actctaagatctgatgaat

SEQ ID NO: 918 - RNA, 19 nt, synthetic construct
  source 1..19: mol_type = other RNA
actctaagatctgatgaan

SEQ ID NO: 919 - RNA, 19 nt, synthetic construct
  source 1..19: mol_type = other RNA
nctctaagatctgatgaan

SEQ ID NO: 920 - RNA, 19 nt, synthetic construct
  source 1..19: mol_type = other RNA
tctaagatctgatgaagta

SEQ ID NO: 921 - RNA, 19 nt, synthetic construct
  source 1..19: mol_type = other RNA
tctaagatctgatgaagtt

SEQ ID NO: 922 - RNA, 19 nt, synthetic construct
  source 1..19: mol_type = other RNA
tctaagatctgatgaagtn

SEQ ID NO: 923 - RNA, 19 nt, synthetic construct
  source 1..19: mol_type = other RNA
nctaagatctgatgaagtn

SEQ ID NO: 924 - RNA, 19 nt, synthetic construct
  source 1..19: mol_type = other RNA
attgccattttgtcctttg

SEQ ID NO: 925 - RNA, 19 nt, synthetic construct
  source 1..19: mol_type = other RNA
attgccattttgtccttta

SEQ ID NO: 926 - RNA, 19 nt, synthetic construct
  source 1..19: mol_type = other RNA
attgccattttgtcctttt

SEQ ID NO: 927 - RNA, 19 nt, synthetic construct
  source 1..19: mol_type = other RNA
attgccattttgtcctttn

SEQ ID NO: 928 - RNA, 19 nt, synthetic construct
  source 1..19: mol_type = other RNA
nttgccattttgtcctttn

SEQ ID NO: 929 - RNA, 19 nt, synthetic construct
  source 1..19: mol_type = other RNA
ccattttgtcctttgatta

SEQ ID NO: 930 - RNA, 19 nt, synthetic construct
  source 1..19: mol_type = other RNA
ccattttgtcctttgattt

SEQ ID NO: 931 - RNA, 19 nt, synthetic construct
  source 1..19: mol_type = other RNA
ccattttgtcctttgattn

SEQ ID NO: 932 - RNA, 19 nt, synthetic construct
  source 1..19: mol_type = other RNA
ncattttgtcctttgattn

SEQ ID NO: 933 - RNA, 19 nt, synthetic construct
  source 1..19: mol_type = other RNA
gggaagttgactaaacttg

SEQ ID NO: 934 - RNA, 19 nt, synthetic construct
  source 1..19: mol_type = other RNA
gggaagttgactaaactta

SEQ ID NO: 935 - RNA, 19 nt, synthetic construct
  source 1..19: mol_type = other RNA
gggaagttgactaaacttt

SEQ ID NO: 936 - RNA, 19 nt, synthetic construct
  source 1..19: mol_type = other RNA
gggaagttgactaaacttn

SEQ ID NO: 937 - RNA, 19 nt, synthetic construct
  source 1..19: mol_type = other RNA
nggaagttgactaaacttn

SEQ ID NO: 938 - RNA, 19 nt, synthetic construct
  source 1..19: mol_type = other RNA
ggaagttgactaaacttga

SEQ ID NO: 939 - RNA, 19 nt, synthetic construct
  source 1..19: mol_type = other RNA
ggaagttgactaaacttgt

SEQ ID NO: 940 - RNA, 19 nt, synthetic construct
  source 1..19: mol_type = other RNA
ggaagttgactaaacttgn

SEQ ID NO: 941 - RNA, 19 nt, synthetic construct
  source 1..19: mol_type = other RNA
ngaagttgactaaacttgn

SEQ ID NO: 942 - RNA, 19 nt, synthetic construct
  source 1..19: mol_type = other RNA
tgtgaataaatggaagcta

SEQ ID NO: 943 - RNA, 19 nt, synthetic construct
  source 1..19: mol_type = other RNA
tgtgaataaatggaagctt

SEQ ID NO: 944 - RNA, 19 nt, synthetic construct
  source 1..19: mol_type = other RNA
tgtgaataaatggaagctn

SEQ ID NO: 945 - RNA, 19 nt, synthetic construct
  source 1..19: mol_type = other RNA
ngtgaataaatggaagctn

SEQ ID NO: 946 - RNA, 19 nt, synthetic construct
  source 1..19: mol_type = other RNA
actagtttcagatcttact

SEQ ID NO: 947 - RNA, 19 nt, synthetic construct
  source 1..19: mol_type = other RNA
actagtttcagatcttaca

SEQ ID NO: 948 - RNA, 19 nt, synthetic construct
  source 1..19: mol_type = other RNA
actagtttcagatcttacn

SEQ ID NO: 949 - RNA, 19 nt, synthetic construct
  source 1..19: mol_type = other RNA
nctagtttcagatcttacn

SEQ ID NO: 950 - RNA, 19 nt, synthetic construct
  source 1..19: mol_type = other RNA
gtttcagatcttactaact

SEQ ID NO: 951 - RNA, 19 nt, synthetic construct
  source 1..19: mol_type = other RNA
gtttcagatcttactaaca

SEQ ID NO: 952 - RNA, 19 nt, synthetic construct
  source 1..19: mol_type = other RNA
gtttcagatcttactaacn

SEQ ID NO: 953 - RNA, 19 nt, synthetic construct
  source 1..19: mol_type = other RNA
ntttcagatcttactaacn

SEQ ID NO: 954 - RNA, 19 nt, synthetic construct
  source 1..19: mol_type = other RNA
ttcagatcttactaacttc

SEQ ID NO: 955 - RNA, 19 nt, synthetic construct
  source 1..19: mol_type = other RNA
ttcagatcttactaactta

SEQ ID NO: 956 - RNA, 19 nt, synthetic construct
  source 1..19: mol_type = other RNA
ttcagatcttactaacttt

SEQ ID NO: 957 - RNA, 19 nt, synthetic construct
  source 1..19: mol_type = other RNA
ttcagatcttactaacttn

SEQ ID NO: 958 - RNA, 19 nt, synthetic construct
  source 1..19: mol_type = other RNA
ntcagatcttactaacttn

SEQ ID NO: 959 - RNA, 19 nt, synthetic construct
  source 1..19: mol_type = other RNA
gcatgtgcttgttttatgg

SEQ ID NO: 960 - RNA, 19 nt, synthetic construct
  source 1..19: mol_type = other RNA
gcatgtgcttgttttatga

SEQ ID NO: 961 - RNA, 19 nt, synthetic construct
  source 1..19: mol_type = other RNA
gcatgtgcttgttttatgt

SEQ ID NO: 962 - RNA, 19 nt, synthetic construct
  source 1..19: mol_type = other RNA
gcatgtgcttgttttatgn

SEQ ID NO: 963 - RNA, 19 nt, synthetic construct
  source 1..19: mol_type = other RNA
ncatgtgcttgttttatgn

SEQ ID NO: 964 - RNA, 19 nt, synthetic construct
  source 1..19: mol_type = other RNA
gacaaagcgaagtgttcag

SEQ ID NO: 965 - RNA, 19 nt, synthetic construct
  source 1..19: mol_type = other RNA
gacaaagcgaagtgttcaa

SEQ ID NO: 966 - RNA, 19 nt, synthetic construct
  source 1..19: mol_type = other RNA
gacaaagcgaagtgttcat

SEQ ID NO: 967 - RNA, 19 nt, synthetic construct
  source 1..19: mol_type = other RNA
gacaaagcgaagtgttcan

SEQ ID NO: 968 - RNA, 19 nt, synthetic construct
  source 1..19: mol_type = other RNA
nacaaagcgaagtgttcan

SEQ ID NO: 969 - RNA, 19 nt, synthetic construct
  source 1..19: mol_type = other RNA
ccagtgacctctagaatct

SEQ ID NO: 970 - RNA, 19 nt, synthetic construct
  source 1..19: mol_type = other RNA
ccagtgacctctagaatca

SEQ ID NO: 971 - RNA, 19 nt, synthetic construct
  source 1..19: mol_type = other RNA
ccagtgacctctagaatcn

SEQ ID NO: 972 - RNA, 19 nt, synthetic construct
  source 1..19: mol_type = other RNA
ncagtgacctctagaatcn

SEQ ID NO: 973 - RNA, 19 nt, synthetic construct
  source 1..19: mol_type = other RNA
gcatttgcacactattcca

SEQ ID NO: 974 - RNA, 19 nt, synthetic construct
  source 1..19: mol_type = other RNA
gcatttgcacactattcct

SEQ ID NO: 975 - RNA, 19 nt, synthetic construct
  source 1..19: mol_type = other RNA
gcatttgcacactattccn

SEQ ID NO: 976 - RNA, 19 nt, synthetic construct
  source 1..19: mol_type = other RNA
ncatttgcacactattccn

SEQ ID NO: 977 - RNA, 19 nt, synthetic construct
  source 1..19: mol_type = other RNA
gacagatgtttgagatcag

SEQ ID NO: 978 - RNA, 19 nt, synthetic construct
  source 1..19: mol_type = other RNA
gacagatgtttgagatcaa

SEQ ID NO: 979 - RNA, 19 nt, synthetic construct
  source 1..19: mol_type = other RNA
gacagatgtttgagatcat

SEQ ID NO: 980 - RNA, 19 nt, synthetic construct
  source 1..19: mol_type = other RNA
gacagatgtttgagatcan

SEQ ID NO: 981 - RNA, 19 nt, synthetic construct
  source 1..19: mol_type = other RNA
nacagatgtttgagatcan

SEQ ID NO: 982 - RNA, 19 nt, synthetic construct
  source 1..19: mol_type = other RNA
tgtgtggcaacttatgctg

SEQ ID NO: 983 - RNA, 19 nt, synthetic construct
  source 1..19: mol_type = other RNA
tgtgtggcaacttatgcta

SEQ ID NO: 984 - RNA, 19 nt, synthetic construct
  source 1..19: mol_type = other RNA
tgtgtggcaacttatgctt

SEQ ID NO: 985 - RNA, 19 nt, synthetic construct
  source 1..19: mol_type = other RNA
tgtgtggcaacttatgctn

SEQ ID NO: 986 - RNA, 19 nt, synthetic construct
  source 1..19: mol_type = other RNA
ngtgtggcaacttatgctn

SEQ ID NO: 987 - RNA, 19 nt, synthetic construct
  source 1..19: mol_type = other RNA
gaccagaccttgattgtgg

SEQ ID NO: 988 - RNA, 19 nt, synthetic construct
  source 1..19: mol_type = other RNA
gaccagaccttgattgtga

SEQ ID NO: 989 - RNA, 19 nt, synthetic construct
  source 1..19: mol_type = other RNA
gaccagaccttgattgtgt

SEQ ID NO: 990 - RNA, 19 nt, synthetic construct
  source 1..19: mol_type = other RNA
gaccagaccttgattgtgn

SEQ ID NO: 991 - RNA, 19 nt, synthetic construct
  source 1..19: mol_type = other RNA
naccagaccttgattgtgn

SEQ ID NO: 992 - RNA, 19 nt, synthetic construct
  source 1..19: mol_type = other RNA
ggagaagcactctctttct

SEQ ID NO: 993 - RNA, 19 nt, synthetic construct
  source 1..19: mol_type = other RNA
ggagaagcactctctttca

SEQ ID NO: 994 - RNA, 19 nt, synthetic construct
  source 1..19: mol_type = other RNA
ggagaagcactctctttcn

SEQ ID NO: 995 - RNA, 19 nt, synthetic construct
  source 1..19: mol_type = other RNA
ngagaagcactctctttcn

SEQ ID NO: 996 - RNA, 19 nt, synthetic construct
  source 1..19: mol_type = other RNA
aaccaaactctctctaacc

SEQ ID NO: 997 - RNA, 19 nt, synthetic construct
  source 1..19: mol_type = other RNA
aaccaaactctctctaaca

SEQ ID NO: 998 - RNA, 19 nt, synthetic construct
  source 1..19: mol_type = other RNA
aaccaaactctctctaact

SEQ ID NO: 999 - RNA, 19 nt, synthetic construct
  source 1..19: mol_type = other RNA
aaccaaactctctctaacn

SEQ ID NO: 1000 - RNA, 19 nt, synthetic construct
  source 1..19: mol_type = other RNA
naccaaactctctctaacn

SEQ ID NO: 1001 - RNA, 19 nt, synthetic construct
  source 1..19: mol_type = other RNA
caaactctctctaaccttg

SEQ ID NO: 1002 - RNA, 19 nt, synthetic construct
  source 1..19: mol_type = other RNA
caaactctctctaacctta

SEQ ID NO: 1003 - RNA, 19 nt, synthetic construct
  source 1..19: mol_type = other RNA
caaactctctctaaccttt

SEQ ID NO: 1004 - RNA, 19 nt, synthetic construct
  source 1..19: mol_type = other RNA
caaactctctctaaccttn

SEQ ID NO: 1005 - RNA, 19 nt, synthetic construct
  source 1..19: mol_type = other RNA
naaactctctctaaccttn

SEQ ID NO: 1006 - RNA, 19 nt, synthetic construct
  source 1..19: mol_type = other RNA
gatgtaagttacaaaacca

SEQ ID NO: 1007 - RNA, 19 nt, synthetic construct
  source 1..19: mol_type = other RNA
gatgtaagttacaaaacct

SEQ ID NO: 1008 - RNA, 19 nt, synthetic construct
  source 1..19: mol_type = other RNA
gatgtaagttacaaaaccn

SEQ ID NO: 1009 - RNA, 19 nt, synthetic construct
  source 1..19: mol_type = other RNA
natgtaagttacaaaaccn

SEQ ID NO: 1010 - RNA, 19 nt, synthetic construct
  source 1..19: mol_type = other RNA
ccacctgtgatgaaagtgc

SEQ ID NO: 1011 - RNA, 19 nt, synthetic construct
  source 1..19: mol_type = other RNA
ccacctgtgatgaaagtga

SEQ ID NO: 1012 - RNA, 19 nt, synthetic construct
  source 1..19: mol_type = other RNA
ccacctgtgatgaaagtgt

SEQ ID NO: 1013 - RNA, 19 nt, synthetic construct
  source 1..19: mol_type = other RNA
ccacctgtgatgaaagtgn

SEQ ID NO: 1014 - RNA, 19 nt, synthetic construct
  source 1..19: mol_type = other RNA
ncacctgtgatgaaagtgn

SEQ ID NO: 1015 - RNA, 19 nt, synthetic construct
  source 1..19: mol_type = other RNA
actggtgcatttataatcc

SEQ ID NO: 1016 - RNA, 19 nt, synthetic construct
  source 1..19: mol_type = other RNA
actggtgcatttataatca

SEQ ID NO: 1017 - RNA, 19 nt, synthetic construct
  source 1..19: mol_type = other RNA
actggtgcatttataatct

SEQ ID NO: 1018 - RNA, 19 nt, synthetic construct
  source 1..19: mol_type = other RNA
actggtgcatttataatcn

SEQ ID NO: 1019 - RNA, 19 nt, synthetic construct
  source 1..19: mol_type = other RNA
actggtgcatttataatcn

SEQ ID NO: 1020 - RNA, 19 nt, synthetic construct
  source 1..19: mol_type = other RNA
agctctgactataactctg

SEQ ID NO: 1021 - RNA, 19 nt, synthetic construct
  source 1..19: mol_type = other RNA
agctctgactataactcta

SEQ ID NO: 1022 - RNA, 19 nt, synthetic construct
  source 1..19: mol_type = other RNA
agctctgactataactctt

SEQ ID NO: 1023 - RNA, 19 nt, synthetic construct
  source 1..19: mol_type = other RNA
agctctgactataactctn

SEQ ID NO: 1024 - RNA, 19 nt, synthetic construct
  source 1..19: mol_type = other RNA
ngctctgactataactctn

SEQ ID NO: 1025 - RNA, 19 nt, synthetic construct
  source 1..19: mol_type = other RNA
cctttacagagcatcctag

SEQ ID NO: 1026 - RNA, 19 nt, synthetic construct
  source 1..19: mol_type = other RNA
cctttacagagcatcctaa

SEQ ID NO: 1027 - RNA, 19 nt, synthetic construct
  source 1..19: mol_type = other RNA
cctttacagagcatcctat

SEQ ID NO: 1028 - RNA, 19 nt, synthetic construct
  source 1..19: mol_type = other RNA
cctttacagagcatcctan

SEQ ID NO: 1029 - RNA, 19 nt, synthetic construct
  source 1..19: mol_type = other RNA
nctttacagagcatcctan

SEQ ID NO: 1030 - RNA, 19 nt, synthetic construct
  source 1..19: mol_type = other RNA
aactaagttaagtctaact

SEQ ID NO: 1031 - RNA, 19 nt, synthetic construct
  source 1..19: mol_type = other RNA
aactaagttaagtctaaca

SEQ ID NO: 1032 - RNA, 19 nt, synthetic construct
  source 1..19: mol_type = other RNA
aactaagttaagtctaacn

SEQ ID NO: 1033 - RNA, 19 nt, synthetic construct
  source 1..19: mol_type = other RNA
nactaagttaagtctaacn

SEQ ID NO: 1034 - RNA, 19 nt, synthetic construct
  source 1..19: mol_type = other RNA
cagagagattgaatttact

SEQ ID NO: 1035 - RNA, 19 nt, synthetic construct
  source 1..19: mol_type = other RNA
cagagagattgaatttaca

SEQ ID NO: 1036 - RNA, 19 nt, synthetic construct
  source 1..19: mol_type = other RNA
cagagagattgaatttacn

SEQ ID NO: 1037 - RNA, 19 nt, synthetic construct
  source 1..19: mol_type = other RNA
nagagagattgaatttacn

SEQ ID NO: 1038 - RNA, 19 nt, synthetic construct
  source 1..19: mol_type = other RNA
gctctggttaacatcaacc

SEQ ID NO: 1039 - RNA, 19 nt, synthetic construct
  source 1..19: mol_type = other RNA
gctctggttaacatcaaca

SEQ ID NO: 1040 - RNA, 19 nt, synthetic construct
  source 1..19: mol_type = other RNA
gctctggttaacatcaact

SEQ ID NO: 1041 - RNA, 19 nt, synthetic construct
  source 1..19: mol_type = other RNA
gctctggttaacatcaacn

SEQ ID NO: 1042 - RNA, 19 nt, synthetic construct
  source 1..19: mol_type = other RNA
nctctggttaacatcaacn

SEQ ID NO: 1043 - RNA, 19 nt, synthetic construct
  source 1..19: mol_type = other RNA
tgacctgacatcatagttt

SEQ ID NO: 1044 - RNA, 19 nt, synthetic construct
  source 1..19: mol_type = other RNA
tgacctgacatcatagtta

SEQ ID NO: 1045 - RNA, 19 nt, synthetic construct
  source 1..19: mol_type = other RNA
tgacctgacatcatagttn

SEQ ID NO: 1046 - RNA, 19 nt, synthetic construct
  source 1..19: mol_type = other RNA
ngacctgacatcatagttn

SEQ ID NO: 1047 - RNA, 19 nt, synthetic construct
  source 1..19: mol_type = other RNA
aaacagatctcgttaatgt

SEQ ID NO: 1048 - RNA, 19 nt, synthetic construct
  source 1..19: mol_type = other RNA
aaacagatctcgttaatga

SEQ ID NO: 1049 - RNA, 19 nt, synthetic construct
  source 1..19: mol_type = other RNA
aaacagatctcgttaatgn

SEQ ID NO: 1050 - RNA, 19 nt, synthetic construct
  source 1..19: mol_type = other RNA
naacagatctcgttaatgn

SEQ ID NO: 1051 - RNA, 19 nt, synthetic construct
  source 1..19: mol_type = other RNA
tcttaaagctatattctgc

SEQ ID NO: 1052 - RNA, 19 nt, synthetic construct
  source 1..19: mol_type = other RNA
tcttaaagctatattctga

SEQ ID NO: 1053 - RNA, 19 nt, synthetic construct
  source 1..19: mol_type = other RNA
tcttaaagctatattctgt

SEQ ID NO: 1054 - RNA, 19 nt, synthetic construct
  source 1..19: mol_type = other RNA
tcttaaagctatattctgn

SEQ ID NO: 1055 - RNA, 19 nt, synthetic construct
  source 1..19: mol_type = other RNA
ncttaaagctatattctgn

SEQ ID NO: 1056 - RNA, 21 nt, synthetic construct
  modified_base 1: mod_base = um
  modified_base 1^2: mod_base = OTHER; note = phosphorothioate linkage
  modified_base 2: mod_base = OTHER; note = 2'-fluoroadenosine
  modified_base 2^3: mod_base = OTHER; note = phosphorothioate linkage
  modified_base 3: mod_base = OTHER; note = 2'-O-methyladenosine
  modified_base 3^4: mod_base = OTHER; note = phosphorothioate linkage
  modified_base 4: mod_base = OTHER; note = 2'-fluorocytidine
  modified_base 5: mod_base = cm
  modified_base 6: mod_base = OTHER; note = 2'-fluoroadenosine
  modified_base 7: mod_base = um
  modified_base 8: mod_base = gm
  modified_base 9: mod_base = um
  modified_base 10: mod_base = um
  modified_base 11: mod_base = um
  modified_base 12: mod_base = OTHER; note = 2'-fluorocytidine
  modified_base 13: mod_base = cm
  modified_base 14: mod_base = OTHER; note = 2'-fluorocytidine
  modified_base 15: mod_base = um
  modified_base 16: mod_base = OTHER; note = 2'-fluorocytidine
  modified_base 17: mod_base = cm
  modified_base 18: mod_base = OTHER; note = 2'-fluorouridine
  modified_base 19: mod_base = gm
  modified_base 20: mod_base = gm
  modified_base 20^21: mod_base = OTHER; note = phosphorothioate linkage
  modified_base 21: mod_base = um
  source 1..21: mol_type = other RNA
taaccatgtttccctcctggt

SEQ ID NO: 1057 - RNA, 21 nt, synthetic construct
  modified_base 1: mod_base = um
  modified_base 1^2: mod_base = OTHER; note = phosphorothioate linkage
  modified_base 2: mod_base = OTHER; note = 2'-fluoroadenosine
  modified_base 2^3: mod_base = OTHER; note = phosphorothioate linkage
  modified_base 3: mod_base = cm
  modified_base 3^4: mod_base = OTHER; note = phosphorothioate linkage
  modified_base 4: mod_base = OTHER; note = 2'-fluorouridine
  modified_base 5: mod_base = um
  modified_base 6: mod_base = OTHER; note = 2'-fluorocytidine
  modified_base 7: mod_base = OTHER; note = 2'-O-methyladenosine
  modified_base 8: mod_base = gm
  modified_base 9: mod_base = gm
  modified_base 10: mod_base = OTHER; note = 2'-O-methyladenosine
  modified_base 11: mod_base = OTHER; note = 2'-O-methyladenosine
  modified_base 12: mod_base = OTHER; note = 2'-fluoroguanosine
  modified_base 13: mod_base = cm
  modified_base 14: mod_base = OTHER; note = 2'-fluorouridine
  modified_base 15: mod_base = gm
  modified_base 16: mod_base = OTHER; note = 2'-fluoroguanosine
  modified_base 17: mod_base = um
  modified_base 18: mod_base = OTHER; note = 2'-fluorouridine
  modified_base 19: mod_base = OTHER; note = 2'-O-methyladenosine
  modified_base 20: mod_base = um
  modified_base 20^21: mod_base = OTHER; note = phosphorothioate linkage
  modified_base 21: mod_base = cm
  source 1..21: mol_type = other RNA
tacttcaggaagctggttatc

SEQ ID NO: 1058 - RNA, 21 nt, synthetic construct
  modified_base 1: mod_base = um
  modified_base 1^2: mod_base = OTHER; note = phosphorothioate linkage
  modified_base 2: mod_base = OTHER; note = 2'-fluoroadenosine
  modified_base 2^3: mod_base = OTHER; note = phosphorothioate linkage
  modified_base 3: mod_base = OTHER; note = 2'-O-methyladenosine
  modified_base 3^4: mod_base = OTHER; note = phosphorothioate linkage
  modified_base 4: mod_base = OTHER; note = 2'-fluorocytidine
  modified_base 5: mod_base = OTHER; note = 2'-O-methyladenosine
  modified_base 6: mod_base = OTHER; note = 2'-fluoroadenosine
  modified_base 7: mod_base = gm
  modified_base 8: mod_base = um
  modified_base 9: mod_base = cm
  modified_base 10: mod_base = um
  modified_base 11: mod_base = gm
  modified_base 12: mod_base = OTHER; note = 2'-fluorocytidine
  modified_base 13: mod_base = um
  modified_base 14: mod_base = OTHER; note = 2'-fluoroadenosine
  modified_base 15: mod_base = um
  modified_base 16: mod_base = OTHER; note = 2'-fluorouridine
  modified_base 17: mod_base = um
  modified_base 18: mod_base = OTHER; note = 2'-fluoroguanosine
  modified_base 19: mod_base = OTHER; note = 2'-O-methyladenosine
  modified_base 20: mod_base = um
  modified_base 20^21: mod_base = OTHER; note = phosphorothioate linkage
  modified_base 21: mod_base = gm
  source 1..21: mol_type = other RNA
taacaagtctgctatttgatg

SEQ ID NO: 1059 - RNA, 21 nt, synthetic construct
  modified_base 1: mod_base = um
  modified_base 1^2: mod_base = OTHER; note = phosphorothioate linkage
  modified_base 2: mod_base = OTHER; note = 2'-fluoroguanosine
  modified_base 2^3: mod_base = OTHER; note = phosphorothioate linkage
  modified_base 3: mod_base = gm
  modified_base 3^4: mod_base = OTHER; note = phosphorothioate linkage
  modified_base 4: mod_base = OTHER; note = 2'-fluoroadenosine
  modified_base 5: mod_base = OTHER; note = 2'-O-methyladenosine
  modified_base 6: mod_base = OTHER; note = 2'-fluorocytidine
  modified_base 7: mod_base = OTHER; note = 2'-O-methyladenosine
  modified_base 8: mod_base = OTHER; note = 2'-O-methyladenosine
  modified_base 9: mod_base = gm
  modified_base 10: mod_base = um
  modified_base 11: mod_base = cm
  modified_base 12: mod_base = OTHER; note = 2'-fluorouridine
  modified_base 13: mod_base = gm
  modified_base 14: mod_base = OTHER; note = 2'-fluorocytidine
  modified_base 15: mod_base = um
  modified_base 16: mod_base = OTHER; note = 2'-fluoroadenosine
  modified_base 17: mod_base = um
  modified_base 18: mod_base = OTHER; note = 2'-fluorouridine
  modified_base 19: mod_base = um
  modified_base 20: mod_base = gm
  modified_base 20^21: mod_base = OTHER; note = phosphorothioate linkage
  modified_base 21: mod_base = gm
  source 1..21: mol_type = other RNA
tggaacaagtctgctatttgg

SEQ ID NO: 1060 - RNA, 21 nt, synthetic construct
  modified_base 1: mod_base = um
  modified_base 1^2: mod_base = OTHER; note = phosphorothioate linkage
  modified_base 2: mod_base = OTHER; note = 2'-fluoroguanosine
  modified_base 2^3: mod_base = OTHER; note = phosphorothioate linkage
  modified_base 3: mod_base = OTHER; note = 2'-O-methyladenosine
  modified_base 3^4: mod_base = OTHER; note = phosphorothioate linkage
  modified_base 4: mod_base = OTHER; note = 2'-fluoroguanosine
  modified_base 5: mod_base = um
  modified_base 6: mod_base = OTHER; note = 2'-fluoroadenosine
  modified_base 7: mod_base = OTHER; note = 2'-O-methyladenosine
  modified_base 8: mod_base = gm
  modified_base 9: mod_base = cm
  modified_base 10: mod_base = OTHER; note = 2'-O-methyladenosine
  modified_base 11: mod_base = OTHER; note = 2'-O-methyladenosine
  modified_base 12: mod_base = OTHER; note = 2'-fluorouridine
  modified_base 13: mod_base = cm
  modified_base 14: mod_base = OTHER; note = 2'-fluorouridine
  modified_base 15: mod_base = gm
  modified_base 16: mod_base = OTHER; note = 2'-fluoroguanosine
  modified_base 17: mod_base = um
  modified_base 18: mod_base = OTHER; note = 2'-fluorocytidine
  modified_base 19: mod_base = cm
  modified_base 20: mod_base = um
  modified_base 20^21: mod_base = OTHER; note = phosphorothioate linkage
  modified_base 21: mod_base = cm
  source 1..21: mol_type = other RNA
tgagtaagcaatctggtcctc

SEQ ID NO: 1061 - RNA, 21 nt, synthetic construct
  modified_base 1: mod_base = um
  modified_base 1^2: mod_base = OTHER; note = phosphorothioate linkage
  modified_base 2: mod_base = OTHER; note = 2'-fluoroguanosine
  modified_base 2^3: mod_base = OTHER; note = phosphorothioate linkage
  modified_base 3: mod_base = um
  modified_base 3^4: mod_base = OTHER; note = phosphorothioate linkage
  modified_base 4: mod_base = OTHER; note = 2'-fluorocytidine
  modified_base 5: mod_base = um
  modified_base 6: mod_base = OTHER; note = 2'-fluoroguanosine
  modified_base 7: mod_base = OTHER; note = 2'-O-methyladenosine
  modified_base 8: mod_base = gm
  modified_base 9: mod_base = um
  modified_base 10: mod_base = OTHER; note = 2'-O-methyladenosine
  modified_base 11: mod_base = OTHER; note = 2'-O-methyladenosine
  modified_base 12: mod_base = OTHER; note = 2'-fluoroguanosine
  modified_base 13: mod_base = cm
  modified_base 14: mod_base = OTHER; note = 2'-fluoroadenosine
  modified_base 15: mod_base = OTHER; note = 2'-O-methyladenosine
  modified_base 16: mod_base = OTHER; note = 2'-fluorouridine
  modified_base 17: mod_base = cm
  modified_base 18: mod_base = OTHER; note = 2'-fluorouridine
  modified_base 19: mod_base = gm
  modified_base 20: mod_base = gm
  modified_base 20^21: mod_base = OTHER; note = phosphorothioate linkage
  modified_base 21: mod_base = um
  source 1..21: mol_type = other RNA
tgtctgagtaagcaatctggt

SEQ ID NO: 1062 - RNA, 21 nt, synthetic construct
  modified_base 1: mod_base = um
  modified_base 1^2: mod_base = OTHER; note = phosphorothioate linkage
  modified_base 2: mod_base = OTHER; note = 2'-fluorouridine
  modified_base 2^3: mod_base = OTHER; note = phosphorothioate linkage
  modified_base 3: mod_base = gm
  modified_base 3^4: mod_base = OTHER; note = phosphorothioate linkage
  modified_base 4: mod_base = OTHER; note = 2'-fluoroguanosine
  modified_base 5: mod_base = um
  modified_base 6: mod_base = OTHER; note = 2'-fluoroguanosine
  modified_base 7: mod_base = OTHER; note = 2',3'-seco-uridine
  modified_base 8: mod_base = cm
  modified_base 9: mod_base = um
  modified_base 10: mod_base = gm
  modified_base 11: mod_base = OTHER; note = 2'-O-methyladenosine
  modified_base 12: mod_base = OTHER; note = 2'-fluoroguanosine
  modified_base 13: mod_base = um
  modified_base 14: mod_base = OTHER; note = 2'-fluoroadenosine
  modified_base 15: mod_base = OTHER; note = 2'-O-methyladenosine
  modified_base 16: mod_base = OTHER; note = 2'-fluoroguanosine
  modified_base 17: mod_base = cm
  modified_base 18: mod_base = OTHER; note = 2'-fluoroadenosine
  modified_base 19: mod_base = OTHER; note = 2'-O-methyladenosine
  modified_base 20: mod_base = um
  modified_base 20^21: mod_base = OTHER; note = phosphorothioate linkage
  modified_base 21: mod_base = cm
  source 1..21: mol_type = other RNA
ttggtgtctgagtaagcaatc

SEQ ID NO: 1063 - RNA, 21 nt, synthetic construct
  modified_base 1: mod_base = um
  modified_base 1^2: mod_base = OTHER; note = phosphorothioate linkage
  modified_base 2: mod_base = OTHER; note = 2'-fluorouridine
  modified_base 2^3: mod_base = OTHER; note = phosphorothioate linkage
  modified_base 3: mod_base = OTHER; note = 2'-O-methyladenosine
  modified_base 3^4: mod_base = OTHER; note = phosphorothioate linkage
  modified_base 4: mod_base = OTHER; note = 2'-fluoroadenosine
  modified_base 5: mod_base = cm
  modified_base 6: mod_base = OTHER; note = 2'-fluorouridine
  modified_base 7: mod_base = um
  modified_base 8: mod_base = um
  modified_base 9: mod_base = cm
  modified_base 10: mod_base = um
  modified_base 11: mod_base = um
  modified_base 12: mod_base = OTHER; note = 2'-fluorocytidine
  modified_base 13: mod_base = um
  modified_base 14: mod_base = OTHER; note = 2'-fluorocytidine
  modified_base 15: mod_base = um
  modified_base 16: mod_base = OTHER; note = 2'-fluoroadenosine
  modified_base 17: mod_base = gm
  modified_base 18: mod_base = OTHER; note = 2'-fluorocytidine
  modified_base 19: mod_base = cm
  modified_base 20: mod_base = um
  modified_base 20^21: mod_base = OTHER; note = phosphorothioate linkage
  modified_base 21: mod_base = gm
  source 1..21: mol_type = other RNA
ttaactttcttctctagcctg

SEQ ID NO: 1064 - RNA, 21 nt, synthetic construct
  modified_base 1: mod_base = um
  modified_base 1^2: mod_base = OTHER; note = phosphorothioate linkage
  modified_base 2: mod_base = OTHER; note = 2'-fluoroguanosine
  modified_base 2^3: mod_base = OTHER; note = phosphorothioate linkage
  modified_base 3: mod_base = gm
  modified_base 3^4: mod_base = OTHER; note = phosphorothioate linkage
  modified_base 4: mod_base = OTHER; note = 2'-fluorouridine
  modified_base 5: mod_base = um
  modified_base 6: mod_base = OTHER; note = 2'-fluoroadenosine
  modified_base 7: mod_base = OTHER; note = 2'-O-methyladenosine
  modified_base 8: mod_base = OTHER; note = 2'-O-methyladenosine
  modified_base 9: mod_base = OTHER; note = 2'-O-methyladenosine
  modified_base 10: mod_base = um
  modified_base 11: mod_base = gm
  modified_base 12: mod_base = OTHER; note = 2'-fluorocytidine
  modified_base 13: mod_base = OTHER; note = 2'-O-methyladenosine
  modified_base 14: mod_base = OTHER; note = 2'-fluorouridine
  modified_base 15: mod_base = cm
  modified_base 16: mod_base = OTHER; note = 2'-fluorouridine
  modified_base 17: mod_base = gm
  modified_base 18: mod_base = OTHER; note = 2'-fluoroguanosine
  modified_base 19: mod_base = OTHER; note = 2'-O-methyladenosine
  modified_base 20: mod_base = OTHER; note = 2'-O-methyladenosine
  modified_base 20^21: mod_base = OTHER; note = phosphorothioate linkage
  modified_base 21: mod_base = cm
  source 1..21: mol_type = other RNA
tggttaaaatgcatctggaac

SEQ ID NO: 1065 - RNA, 21 nt, synthetic construct
  modified_base 1: mod_base = OTHER; note = 2'-O-methyladenosine
  modified_base 1^2: mod_base = OTHER; note = phosphorothioate linkage
  modified_base 2: mod_base = OTHER; note = 2'-fluoroadenosine
  modified_base 2^3: mod_base = OTHER; note = phosphorothioate linkage
  modified_base 3: mod_base = cm
  modified_base 3^4: mod_base = OTHER; note = phosphorothioate linkage
  modified_base 4: mod_base = OTHER; note = 2'-fluorouridine
  modified_base 5: mod_base = um
  modified_base 6: mod_base = OTHER; note = 2'-fluorouridine
  modified_base 7: mod_base = cm
  modified_base 8: mod_base = gm
  modified_base 9: mod_base = um
  modified_base 10: mod_base = um
  modified_base 11: mod_base = cm
  modified_base 12: mod_base = OTHER; note = 2'-fluorouridine
  modified_base 13: mod_base = gm
  modified_base 14: mod_base = OTHER; note = 2'-fluoroadenosine
  modified_base 15: mod_base = OTHER; note = 2'-O-methyladenosine
  modified_base 16: mod_base = OTHER; note = 2'-fluoroguanosine
  modified_base 17: mod_base = gm
  modified_base 18: mod_base = OTHER; note = 2'-fluoroguanosine
  modified_base 19: mod_base = um
  modified_base 20: mod_base = cm
  modified_base 20^21: mod_base = OTHER; note = phosphorothioate linkage
  modified_base 21: mod_base = OTHER; note = 2'-O-methyladenosine
  source 1..21: mol_type = other RNA
aactttcgttctgaagggtca

SEQ ID NO: 1066 - RNA, 21 nt, synthetic construct
  modified_base 1: mod_base = um
  modified_base 1^2: mod_base = OTHER; note = phosphorothioate linkage
  modified_base 2: mod_base = OTHER; note = 2'-fluorouridine
  modified_base 2^3: mod_base = OTHER; note = phosphorothioate linkage
  modified_base 3: mod_base = cm
  modified_base 3^4: mod_base = OTHER; note = phosphorothioate linkage
  modified_base 4: mod_base = OTHER; note = 2'-fluorocytidine
  modified_base 5: mod_base = OTHER; note = 2'-O-methyladenosine
  modified_base 6: mod_base = OTHER; note = 2'-fluorouridine
  modified_base 7: mod_base = OTHER; note = 2'-O-methyladenosine
  modified_base 8: mod_base = um
  modified_base 9: mod_base = OTHER; note = 2'-O-methyladenosine
  modified_base 10: mod_base = OTHER; note = 2'-O-methyladenosine
  modified_base 11: mod_base = cm
  modified_base 12: mod_base = OTHER; note = 2'-fluorouridine
  modified_base 13: mod_base = um
  modified_base 14: mod_base = OTHER; note = 2'-fluorouridine
  modified_base 15: mod_base = cm
  modified_base 16: mod_base = OTHER; note = 2'-fluoroguanosine
  modified_base 17: mod_base = um
  modified_base 18: mod_base = OTHER; note = 2'-fluorouridine
  modified_base 19: mod_base = cm
  modified_base 20: mod_base = um
  modified_base 20^21: mod_base = OTHER; note = phosphorothioate linkage
  modified_base 21: mod_base = gm
  source 1..21: mol_type = other RNA
ttccatataactttcgttctg

SEQ ID NO: 1067 - RNA, 21 nt, synthetic construct
  modified_base 1: mod_base = um
  modified_base 1^2: mod_base = OTHER; note = phosphorothioate linkage
  modified_base 2: mod_base = OTHER; note = 2'-fluoroguanosine
  modified_base 2^3: mod_base = OTHER; note = phosphorothioate linkage
  modified_base 3: mod_base = OTHER; note = 2'-O-methyladenosine
  modified_base 3^4: mod_base = OTHER; note = phosphorothioate linkage
  modified_base 4: mod_base = OTHER; note = 2'-fluorouridine
  modified_base 5: mod_base = um
  modified_base 6: mod_base = OTHER; note = 2'-fluorouridine
  modified_base 7: mod_base = um
  modified_base 8: mod_base = cm
  modified_base 9: mod_base = cm
  modified_base 10: mod_base = OTHER; note = 2'-O-methyladenosine
  modified_base 11: mod_base = um
  modified_base 12: mod_base = OTHER; note = 2'-fluoroadenosine
  modified_base 13: mod_base = um
  modified_base 14: mod_base = OTHER; note = 2'-fluoroadenosine
  modified_base 15: mod_base = OTHER; note = 2'-O-methyladenosine
  modified_base 16: mod_base = OTHER; note = 2'-fluorocytidine
  modified_base 17: mod_base = um
  modified_base 18: mod_base = OTHER; note = 2'-fluorouridine
  modified_base 19: mod_base = um
  modified_base 20: mod_base = cm
  modified_base 20^21: mod_base = OTHER; note = phosphorothioate linkage
  modified_base 21: mod_base = gm
  source 1..21: mol_type = other RNA
tgattttccatataactttcg

SEQ ID NO: 1068 - RNA, 21 nt, synthetic construct
  modified_base 1: mod_base = OTHER; note = 2'-O-methyladenosine
  modified_base 1^2: mod_base = OTHER; note = phosphorothioate linkage
  modified_base 2: mod_base = OTHER; note = 2'-fluoroadenosine
  modified_base 2^3: mod_base = OTHER; note = phosphorothioate linkage
  modified_base 3: mod_base = OTHER; note = 2'-O-methyladenosine
  modified_base 3^4: mod_base = OTHER; note = phosphorothioate linkage
  modified_base 4: mod_base = OTHER; note = 2'-fluoroguanosine
  modified_base 5: mod_base = OTHER; note = 2'-O-methyladenosine
  modified_base 6: mod_base = OTHER; note = 2'-fluoroguanosine
  modified_base 7: mod_base = um
  modified_base 8: mod_base = gm
  modified_base 9: mod_base = gm
  modified_base 10: mod_base = um
  modified_base 11: mod_base = gm
  modified_base 12: mod_base = OTHER; note = 2'-fluoroadenosine
  modified_base 13: mod_base = um
  modified_base 14: mod_base = OTHER; note = 2'-fluorouridine
  modified_base 15: mod_base = um
  modified_base 16: mod_base = OTHER; note = 2'-fluorouridine
  modified_base 17: mod_base = cm
  modified_base 18: mod_base = OTHER; note = 2'-fluorocytidine
  modified_base 19: mod_base = OTHER; note = 2'-O-methyladenosine
  modified_base 20: mod_base = um
  modified_base 20^21: mod_base = OTHER; note = phosphorothioate linkage
  modified_base 21: mod_base = gm
  source 1..21: mol_type = other RNA
aaagagtggtgattttccatg

SEQ ID NO: 1069 - RNA, 21 nt, synthetic construct
  modified_base 1: mod_base = um
  modified_base 1^2: mod_base = OTHER; note = phosphorothioate linkage
  modified_base 2: mod_base = OTHER; note = 2'-fluorocytidine
  modified_base 2^3: mod_base = OTHER; note = phosphorothioate linkage
  modified_base 3: mod_base = OTHER; note = 2'-O-methyladenosine
  modified_base 3^4: mod_base = OTHER; note = phosphorothioate linkage
  modified_base 4: mod_base = OTHER; note = 2'-fluorouridine
  modified_base 5: mod_base = cm
  modified_base 6: mod_base = OTHER; note = 2'-fluorouridine
  modified_base 7: mod_base = OTHER; note = 2'-O-methyladenosine
  modified_base 8: mod_base = OTHER; note = 2'-O-methyladenosine
  modified_base 9: mod_base = um
  modified_base 10: mod_base = OTHER; note = 2'-O-methyladenosine
  modified_base 11: mod_base = um
  modified_base 12: mod_base = OTHER; note = 2'-fluorouridine
  modified_base 13: mod_base = cm
  modified_base 14: mod_base = OTHER; note = 2'-fluorocytidine
  modified_base 15: mod_base = OTHER; note = 2'-O-methyladenosine
  modified_base 16: mod_base = OTHER; note = 2'-fluoroguanosine
  modified_base 17: mod_base = gm
  modified_base 18: mod_base = OTHER; note = 2'-fluoroadenosine
  modified_base 19: mod_base = cm
  modified_base 20: mod_base = OTHER; note = 2'-O-methyladenosine
  modified_base 20^21: mod_base = OTHER; note = phosphorothioate linkage
  modified_base 21: mod_base = cm
  source 1..21: mol_type = other RNA
tcatctaatattccaggacac

SEQ ID NO: 1070 - RNA, 21 nt, synthetic construct
  modified_base 1: mod_base = OTHER; note = 2'-O-methyladenosine
  modified_base 1^2: mod_base = OTHER; note = phosphorothioate linkage
  modified_base 2: mod_base = OTHER; note = 2'-fluoroguanosine
  modified_base 2^3: mod_base = OTHER; note = phosphorothioate linkage
  modified_base 3: mod_base = um
  modified_base 3^4: mod_base = OTHER; note = phosphorothioate linkage
  modified_base 4: mod_base = OTHER; note = 2'-fluoroguanosine
  modified_base 5: mod_base = um
  modified_base 6: mod_base = OTHER; note = 2'-fluorouridine
  modified_base 7: mod_base = gm
  modified_base 8: mod_base = um
  modified_base 9: mod_base = cm
  modified_base 10: mod_base = OTHER; note = 2'-O-methyladenosine
  modified_base 11: mod_base = um
  modified_base 12: mod_base = OTHER; note = 2'-fluorouridine
  modified_base 13: mod_base = um
  modified_base 14: mod_base = OTHER; note = 2'-fluorouridine
  modified_base 15: mod_base = um
  modified_base 16: mod_base = OTHER; note = 2'-fluoroguanosine
  modified_base 17: mod_base = OTHER; note = 2'-O-methyladenosine
  modified_base 18: mod_base = OTHER; note = 2'-fluoroguanosine
  modified_base 19: mod_base = OTHER; note = 2'-O-methyladenosine
  modified_base 20: mod_base = OTHER; note = 2'-O-methyladenosine
  modified_base 20^21: mod_base = OTHER; note = phosphorothioate linkage
  modified_base 21: mod_base = cm
  source 1..21: mol_type = other RNA
agtgttgtcatttttgagaac

SEQ ID NO: 1071 - RNA, 21 nt, synthetic construct
  modified_base 1: mod_base = um
  modified_base 1^2: mod_base = OTHER; note = phosphorothioate linkage
  modified_base 2: mod_base = OTHER; note = 2'-fluoroadenosine
  modified_base 2^3: mod_base = OTHER; note = phosphorothioate linkage
  modified_base 3: mod_base = um
  modified_base 3^4: mod_base = OTHER; note = phosphorothioate linkage
  modified_base 4: mod_base = OTHER; note = 2'-fluoroguanosine
  modified_base 5: mod_base = cm
  modified_base 6: mod_base = OTHER; note = 2'-fluorouridine
  modified_base 7: mod_base = um
  modified_base 8: mod_base = cm
  modified_base 9: mod_base = OTHER; note = 2'-O-methyladenosine
  modified_base 10: mod_base = OTHER; note = 2'-O-methyladenosine
  modified_base 11: mod_base = gm
  modified_base 12: mod_base = OTHER; note = 2'-fluorouridine
  modified_base 13: mod_base = gm
  modified_base 14: mod_base = OTHER; note = 2'-fluorouridine
  modified_base 15: mod_base = um
  modified_base 16: mod_base = OTHER; note = 2'-fluoroguanosine
  modified_base 17: mod_base = um
  modified_base 18: mod_base = OTHER; note = 2'-fluorocytidine
  modified_base 19: mod_base = OTHER; note = 2'-O-methyladenosine
  modified_base 20: mod_base = um
  modified_base 20^21: mod_base = OTHER; note = phosphorothioate linkage
  modified_base 21: mod_base = cm
  source 1..21: mol_type = other RNA
tatgcttcaagtgttgtcatc

SEQ ID NO: 1072 - RNA, 21 nt, synthetic construct
  modified_base 1: mod_base = OTHER; note = 2'-O-methyladenosine
  modified_base 1^2: mod_base = OTHER; note = phosphorothioate linkage
  modified_base 2: mod_base = OTHER; note = 2'-fluorocytidine
  modified_base 2^3: mod_base = OTHER; note = phosphorothioate linkage
  modified_base 3: mod_base = OTHER; note = 2'-O-methyladenosine
  modified_base 3^4: mod_base = OTHER; note = phosphorothioate linkage
  modified_base 4: mod_base = OTHER; note = 2'-fluorocytidine
  modified_base 5: mod_base = cm
  modified_base 6: mod_base = OTHER; note = 2'-fluoroadenosine
  modified_base 7: mod_base = OTHER; note = 2',3'-seco-uridine
  modified_base 8: mod_base = gm
  modified_base 9: mod_base = cm
  modified_base 10: mod_base = um
  modified_base 11: mod_base = um
  modified_base 12: mod_base = OTHER; note = 2'-fluorocytidine
  modified_base 13: mod_base = OTHER; note = 2'-O-methyladenosine
  modified_base 14: mod_base = OTHER; note = 2'-fluoroadenosine
  modified_base 15: mod_base = gm
  modified_base 16: mod_base = OTHER; note = 2'-fluorouridine
  modified_base 17: mod_base = gm
  modified_base 18: mod_base = OTHER; note = 2'-fluorouridine
  modified_base 19: mod_base = um
  modified_base 20: mod_base = gm
  modified_base 20^21: mod_base = OTHER; note = phosphorothioate linkage
  modified_base 21: mod_base = cm
  source 1..21: mol_type = other RNA
acaccatgcttcaagtgttgc

SEQ ID NO: 1073 - RNA, 21 nt, synthetic construct
  modified_base 1: mod_base = OTHER; note = 2'-O-methyladenosine
  modified_base 1^2: mod_base = OTHER; note = phosphorothioate linkage
  modified_base 2: mod_base = OTHER; note = 2'-fluoroguanosine
  modified_base 2^3: mod_base = OTHER; note = phosphorothioate linkage
  modified_base 3: mod_base = um
  modified_base 3^4: mod_base = OTHER; note = phosphorothioate linkage
  modified_base 4: mod_base = OTHER; note = 2'-fluorouridine
  modified_base 5: mod_base = cm
  modified_base 6: mod_base = OTHER; note = 2'-fluorouridine
  modified_base 7: mod_base = gm
  modified_base 8: mod_base = OTHER; note = 2'-O-methyladenosine
  modified_base 9: mod_base = OTHER; note = 2'-O-methyladenosine
  modified_base 10: mod_base = OTHER; note = 2'-O-methyladenosine
  modified_base 11: mod_base = cm
  modified_base 12: mod_base = OTHER; note = 2'-fluoroadenosine
  modified_base 13: mod_base = cm
  modified_base 14: mod_base = OTHER; note = 2'-fluorocytidine
  modified_base 15: mod_base = OTHER; note = 2'-O-methyladenosine
  modified_base 16: mod_base = OTHER; note = 2'-fluorouridine
  modified_base 17: mod_base = gm
  modified_base 18: mod_base = OTHER; note = 2'-fluorocytidine
  modified_base 19: mod_base = um
  modified_base 20: mod_base = um
  modified_base 20^21: mod_base = OTHER; note = phosphorothioate linkage
  modified_base 21: mod_base = cm
  source 1..21: mol_type = other RNA
agttctgaaacaccatgcttc

SEQ ID NO: 1074 - RNA, 21 nt, synthetic construct
  modified_base 1: mod_base = um
  modified_base 1^2: mod_base = OTHER; note = phosphorothioate linkage
  modified_base 2: mod_base = OTHER; note = 2'-fluoroadenosine
  modified_base 2^3: mod_base = OTHER; note = phosphorothioate linkage
  modified_base 3: mod_base = um
  modified_base 3^4: mod_base = OTHER; note = phosphorothioate linkage
  modified_base 4: mod_base = OTHER; note = 2'-fluorouridine
  modified_base 5: mod_base = gm
  modified_base 6: mod_base = OTHER; note = 2'-fluoroadenosine
  modified_base 7: mod_base = OTHER; note = 2'-O-methyladenosine
  modified_base 8: mod_base = gm
  modified_base 9: mod_base = cm
  modified_base 10: mod_base = OTHER; note = 2'-O-methyladenosine
  modified_base 11: mod_base = um
  modified_base 12: mod_base = OTHER; note = 2'-fluorouridine
  modified_base 13: mod_base = gm
  modified_base 14: mod_base = OTHER; note = 2'-fluoroadenosine
  modified_base 15: mod_base = gm
  modified_base 16: mod_base = OTHER; note = 2'-fluoroadenosine
  modified_base 17: mod_base = cm
  modified_base 18: mod_base = OTHER; note = 2'-fluoroadenosine
  modified_base 19: mod_base = cm
  modified_base 20: mod_base = cm
  modified_base 20^21: mod_base = OTHER; note = phosphorothioate linkage
  modified_base 21: mod_base = OTHER; note = 2'-O-methyladenosine
  source 1..21: mol_type = other RNA
tattgaagcattgagacacca

SEQ ID NO: 1075 - RNA, 21 nt, synthetic construct
  modified_base 1: mod_base = um
  modified_base 1^2: mod_base = OTHER; note = phosphorothioate linkage
  modified_base 2: mod_base = OTHER; note = 2'-fluoroguanosine
  modified_base 2^3: mod_base = OTHER; note = phosphorothioate linkage
  modified_base 3: mod_base = OTHER; note = 2'-O-methyladenosine
  modified_base 3^4: mod_base = OTHER; note = phosphorothioate linkage
  modified_base 4: mod_base = OTHER; note = 2'-fluorocytidine
  modified_base 5: mod_base = OTHER; note = 2'-O-methyladenosine
  modified_base 6: mod_base = OTHER; note = 2'-fluorouridine
  modified_base 7: mod_base = um
  modified_base 8: mod_base = gm
  modified_base 9: mod_base = OTHER; note = 2'-O-methyladenosine
  modified_base 10: mod_base = OTHER; note = 2'-O-methyladenosine
  modified_base 11: mod_base = gm
  modified_base 12: mod_base = OTHER; note = 2'-fluorocytidine
  modified_base 13: mod_base = OTHER; note = 2'-O-methyladenosine
  modified_base 14: mod_base = OTHER; note = 2'-fluorouridine
  modified_base 15: mod_base = um
  modified_base 16: mod_base = OTHER; note = 2'-fluoroguanosine
  modified_base 17: mod_base = OTHER; note = 2'-O-methyladenosine
  modified_base 18: mod_base = OTHER; note = 2'-fluoroguanosine
  modified_base 19: mod_base = OTHER; note = 2'-O-methyladenosine
  modified_base 20: mod_base = cm
  modified_base 20^21: mod_base = OTHER; note = phosphorothioate linkage
  modified_base 21: mod_base = gm
  source 1..21: mol_type = other RNA
tgacattgaagcattgagacg

SEQ ID NO: 1076 - RNA, 21 nt, synthetic construct
  modified_base 1: mod_base = um
  modified_base 1^2: mod_base = OTHER; note = phosphorothioate linkage
  modified_base 2: mod_base = OTHER; note = 2'-fluoroguanosine
  modified_base 2^3: mod_base = OTHER; note = phosphorothioate linkage
  modified_base 3: mod_base = OTHER; note = 2'-O-methyladenosine
  modified_base 3^4: mod_base = OTHER; note = phosphorothioate linkage
  modified_base 4: mod_base = OTHER; note = 2'-fluoroguanosine
  modified_base 5: mod_base = um
  modified_base 6: mod_base = OTHER; note = 2'-fluorouridine
  modified_base 7: mod_base = um
  modified_base 8: mod_base = um
  modified_base 9: mod_base = cm
  modified_base 10: mod_base = OTHER; note = 2'-O-methyladenosine
  modified_base 11: mod_base = gm
  modified_base 12: mod_base = OTHER; note = 2'-fluoroadenosine
  modified_base 13: mod_base = OTHER; note = 2'-O-methyladenosine
  modified_base 14: mod_base = OTHER; note = 2'-fluorouridine
  modified_base 15: mod_base = cm
  modified_base 16: mod_base = OTHER; note = 2'-fluorocytidine
  modified_base 17: mod_base = um
  modified_base 18: mod_base = OTHER; note = 2'-fluoroguanosine
  modified_base 19: mod_base = um
  modified_base 20: mod_base = cm
  modified_base 20^21: mod_base = OTHER; note = phosphorothioate linkage
  modified_base 21: mod_base = cm
  source 1..21: mol_type = other RNA
tgagttttcagaatcctgtcc

SEQ ID NO: 1077 - RNA, 21 nt, synthetic construct
  modified_base 1: mod_base = OTHER; note = 2'-O-methyladenosine
  modified_base 1^2: mod_base = OTHER; note = phosphorothioate linkage
  modified_base 2: mod_base = OTHER; note = 2'-fluoroadenosine
  modified_base 2^3: mod_base = OTHER; note = phosphorothioate linkage
  modified_base 3: mod_base = gm
  modified_base 3^4: mod_base = OTHER; note = phosphorothioate linkage
  modified_base 4: mod_base = OTHER; note = 2'-fluoroadenosine
  modified_base 5: mod_base = OTHER; note = 2'-O-methyladenosine
  modified_base 6: mod_base = OTHER; note = 2'-fluorocytidine
  modified_base 7: mod_base = um
  modified_base 8: mod_base = OTHER; note = 2'-O-methyladenosine
  modified_base 9: mod_base = um
  modified_base 10: mod_base = um
  modified_base 11: mod_base = cm
  modified_base 12: mod_base = OTHER; note = 2'-fluorocytidine
  modified_base 13: mod_base = OTHER; note = 2'-O-methyladenosine
  modified_base 14: mod_base = OTHER; note = 2'-fluorouridine
  modified_base 15: mod_base = OTHER; note = 2'-O-methyladenosine
  modified_base 16: mod_base = OTHER; note = 2'-fluoroadenosine
  modified_base 17: mod_base = um
  modified_base 18: mod_base = OTHER; note = 2'-fluorocytidine
  modified_base 19: mod_base = OTHER; note = 2'-O-methyladenosine
  modified_base 20: mod_base = gm
  modified_base 20^21: mod_base = OTHER; note = phosphorothioate linkage
  modified_base 21: mod_base = cm
  source 1..21: mol_type = other RNA
aagaactattccataatcagc

SEQ ID NO: 1078 - RNA, 21 nt, synthetic construct
  modified_base 1: mod_base = OTHER; note = 2'-O-methyladenosine
  modified_base 1^2: mod_base = OTHER; note = phosphorothioate linkage
  modified_base 2: mod_base = OTHER; note = 2'-fluoroguanosine
  modified_base 2^3: mod_base = OTHER; note = phosphorothioate linkage
  modified_base 3: mod_base = OTHER; note = 2'-O-methyladenosine
  modified_base 3^4: mod_base = OTHER; note = phosphorothioate linkage
  modified_base 4: mod_base = OTHER; note = 2'-fluoroadenosine
  modified_base 5: mod_base = OTHER; note = 2'-O-methyladenosine
  modified_base 6: mod_base = OTHER; note = 2'-fluoroguanosine
  modified_base 7: mod_base = OTHER; note = 2'-O-methyladenosine
  modified_base 8: mod_base = OTHER; note = 2'-O-methyladenosine
  modified_base 9: mod_base = cm
  modified_base 10: mod_base = um
  modified_base 11: mod_base = OTHER; note = 2'-O-methyladenosine
  modified_base 12: mod_base = OTHER; note = 2'-fluorouridine
  modified_base 13: mod_base = um
  modified_base 14: mod_base = OTHER; note = 2'-fluorocytidine
  modified_base 15: mod_base = cm
  modified_base 16: mod_base = OTHER; note = 2'-fluoroadenosine
  modified_base 17: mod_base = um
  modified_base 18: mod_base = OTHER; note = 2'-fluoroadenosine
  modified_base 19: mod_base = OTHER; note = 2'-O-methyladenosine
  modified_base 20: mod_base = um
  modified_base 20^21: mod_base = OTHER; note = phosphorothioate linkage
  modified_base 21: mod_base = cm
  source 1..21: mol_type = other RNA
agaaagaactattccataatc

SEQ ID NO: 1079 - RNA, 21 nt, synthetic construct
  modified_base 1: mod_base = OTHER; note = 2'-O-methyladenosine
  modified_base 1^2: mod_base = OTHER; note = phosphorothioate linkage
  modified_base 2: mod_base = OTHER; note = 2'-fluoroguanosine
  modified_base 2^3: mod_base = OTHER; note = phosphorothioate linkage
  modified_base 3: mod_base = OTHER; note = 2'-O-methyladenosine
  modified_base 3^4: mod_base = OTHER; note = phosphorothioate linkage
  modified_base 4: mod_base = OTHER; note = 2'-fluorouridine
  modified_base 5: mod_base = cm
  modified_base 6: mod_base = OTHER; note = 2'-fluorocytidine
  modified_base 7: mod_base = OTHER; note = 2'-O-methyladenosine
  modified_base 8: mod_base = gm
  modified_base 9: mod_base = OTHER; note = 2'-O-methyladenosine
  modified_base 10: mod_base = um
  modified_base 11: mod_base = cm
  modified_base 12: mod_base = OTHER; note = 2'-fluorouridine
  modified_base 13: mod_base = OTHER; note = 2'-O-methyladenosine
  modified_base 14: mod_base = OTHER; note = 2'-fluorouridine
  modified_base 15: mod_base = gm
  modified_base 16: mod_base = OTHER; note = 2'-fluoroguanosine
  modified_base 17: mod_base = OTHER; note = 2'-O-methyladenosine
  modified_base 18: mod_base = OTHER; note = 2'-fluoroadenosine
  modified_base 19: mod_base = OTHER; note = 2'-O-methyladenosine
  modified_base 20: mod_base = OTHER; note = 2'-O-methyladenosine
  modified_base 20^21: mod_base = OTHER; note = phosphorothioate linkage
  modified_base 21: mod_base = cm
  source 1..21: mol_type = other RNA
agatccagatctatggaaaac

SEQ ID NO: 1080 - RNA, 21 nt, synthetic construct
  modified_base 1: mod_base = OTHER; note = 2'-O-methyladenosine
  modified_base 1^2: mod_base = OTHER; note = phosphorothioate linkage
  modified_base 2: mod_base = OTHER; note = 2'-fluorouridine
  modified_base 2^3: mod_base = OTHER; note = phosphorothioate linkage
  modified_base 3: mod_base = cm
  modified_base 3^4: mod_base = OTHER; note = phosphorothioate linkage
  modified_base 4: mod_base = OTHER; note = 2'-fluorocytidine
  modified_base 5: mod_base = OTHER; note = 2'-O-methyladenosine
  modified_base 6: mod_base = OTHER; note = 2'-fluoroadenosine
  modified_base 7: mod_base = um
  modified_base 8: mod_base = gm
  modified_base 9: mod_base = cm
  modified_base 10: mod_base = um
  modified_base 11: mod_base = gm
  modified_base 12: mod_base = OTHER; note = 2'-fluorouridine
  modified_base 13: mod_base = cm
  modified_base 14: mod_base = OTHER; note = 2'-fluorouridine
  modified_base 15: mod_base = gm
  modified_base 16: mod_base = OTHER; note = 2'-fluoroadenosine
  modified_base 17: mod_base = gm
  modified_base 18: mod_base = OTHER; note = 2'-fluoroadenosine
  modified_base 19: mod_base = OTHER; note = 2'-O-methyladenosine
  modified_base 20: mod_base = gm
  modified_base 20^21: mod_base = OTHER; note = phosphorothioate linkage
  modified_base 21: mod_base = cm
  source 1..21: mol_type = other RNA
atccaatgctgtctgagaagc

SEQ ID NO: 1081 - RNA, 21 nt, synthetic construct
  modified_base 1: mod_base = OTHER; note = 2'-O-methyladenosine
  modified_base 1^2: mod_base = OTHER; note = phosphorothioate linkage
  modified_base 2: mod_base = OTHER; note = 2'-fluorocytidine
  modified_base 2^3: mod_base = OTHER; note = phosphorothioate linkage
  modified_base 3: mod_base = cm
  modified_base 3^4: mod_base = OTHER; note = phosphorothioate linkage
  modified_base 4: mod_base = OTHER; note = 2'-fluorouridine
  modified_base 5: mod_base = um
  modified_base 6: mod_base = OTHER; note = 2'-fluorouridine
  modified_base 7: mod_base = OTHER; note = 2'-O-methyladenosine
  modified_base 8: mod_base = gm
  modified_base 9: mod_base = gm
  modified_base 10: mod_base = OTHER; note = 2'-O-methyladenosine
  modified_base 11: mod_base = OTHER; note = 2'-O-methyladenosine
  modified_base 12: mod_base = OTHER; note = 2'-fluoroadenosine
  modified_base 13: mod_base = um
  modified_base 14: mod_base = OTHER; note = 2'-fluorocytidine
  modified_base 15: mod_base = cm
  modified_base 16: mod_base = OTHER; note = 2'-fluoroadenosine
  modified_base 17: mod_base = OTHER; note = 2'-O-methyladenosine
  modified_base 18: mod_base = OTHER; note = 2'-fluorouridine
  modified_base 19: mod_base = gm
  modified_base 20: mod_base = cm
  modified_base 20^21: mod_base = OTHER; note = phosphorothioate linkage
  modified_base 21: mod_base = cm
  source 1..21: mol_type = other RNA
acctttaggaaatccaatgcc

SEQ ID NO: 1082 - RNA, 21 nt, synthetic construct
  modified_base 1: mod_base = um
  modified_base 1^2: mod_base = OTHER; note = phosphorothioate linkage
  modified_base 2: mod_base = OTHER; note = 2'-fluorocytidine
  modified_base 2^3: mod_base = OTHER; note = phosphorothioate linkage
  modified_base 3: mod_base = OTHER; note = 2'-O-methyladenosine
  modified_base 3^4: mod_base = OTHER; note = phosphorothioate linkage
  modified_base 4: mod_base = OTHER; note = 2'-fluorocytidine
  modified_base 5: mod_base = cm
  modified_base 6: mod_base = OTHER; note = 2'-fluorouridine
  modified_base 7: mod_base = um
  modified_base 8: mod_base = um
  modified_base 9: mod_base = OTHER; note = 2'-O-methyladenosine
  modified_base 10: mod_base = gm
  modified_base 11: mod_base = gm
  modified_base 12: mod_base = OTHER; note = 2'-fluoroadenosine
  modified_base 13: mod_base = OTHER; note = 2'-O-methyladenosine
  modified_base 14: mod_base = OTHER; note = 2'-fluoroadenosine
  modified_base 15: mod_base = um
  modified_base 16: mod_base = OTHER; note = 2'-fluorocytidine
  modified_base 17: mod_base = cm
  modified_base 18: mod_base = OTHER; note = 2'-fluoroadenosine
  modified_base 19: mod_base = OTHER; note = 2'-O-methyladenosine
  modified_base 20: mod_base = um
  modified_base 20^21: mod_base = OTHER; note = phosphorothioate linkage
  modified_base 21: mod_base = gm
  source 1..21: mol_type = other RNA
tcacctttaggaaatccaatg

SEQ ID NO: 1083 - RNA, 21 nt, synthetic construct
  modified_base 1: mod_base = um
  modified_base 1^2: mod_base = OTHER; note = phosphorothioate linkage
  modified_base 2: mod_base = OTHER; note = 2'-fluoroguanosine
  modified_base 2^3: mod_base = OTHER; note = phosphorothioate linkage
  modified_base 3: mod_base = gm
  modified_base 3^4: mod_base = OTHER; note = phosphorothioate linkage
  modified_base 4: mod_base = OTHER; note = 2'-fluorouridine
  modified_base 5: mod_base = um
  modified_base 6: mod_base = OTHER; note = 2'-fluorouridine
  modified_base 7: mod_base = um
  modified_base 8: mod_base = OTHER; note = 2'-O-methyladenosine
  modified_base 9: mod_base = OTHER; note = 2'-O-methyladenosine
  modified_base 10: mod_base = OTHER; note = 2'-O-methyladenosine
  modified_base 11: mod_base = cm
  modified_base 12: mod_base = OTHER; note = 2'-fluoroadenosine
  modified_base 13: mod_base = OTHER; note = 2'-O-methyladenosine
  modified_base 14: mod_base = OTHER; note = 2'-fluorocytidine
  modified_base 15: mod_base = um
  modified_base 16: mod_base = OTHER; note = 2'-fluoroguanosine
  modified_base 17: mod_base = OTHER; note = 2'-O-methyladenosine
  modified_base 18: mod_base = OTHER; note = 2'-fluorocytidine
  modified_base 19: mod_base = OTHER; note = 2'-O-methyladenosine
  modified_base 20: mod_base = um
  modified_base 20^21: mod_base = OTHER; note = phosphorothioate linkage
  modified_base 21: mod_base = gm
  source 1..21: mol_type = other RNA
tggttttaaacaactgacatg

SEQ ID NO: 1084 - RNA, 21 nt, synthetic construct
  modified_base 1: mod_base = um
  modified_base 1^2: mod_base = OTHER; note = phosphorothioate linkage
  modified_base 2: mod_base = OTHER; note = 2'-fluorouridine
  modified_base 2^3: mod_base = OTHER; note = phosphorothioate linkage
  modified_base 3: mod_base = cm
  modified_base 3^4: mod_base = OTHER; note = phosphorothioate linkage
  modified_base 4: mod_base = OTHER; note = 2'-fluoroadenosine
  modified_base 5: mod_base = um
  modified_base 6: mod_base = OTHER; note = 2'-fluorocytidine
  modified_base 7: mod_base = OTHER; note = 2'-O-methyladenosine
  modified_base 8: mod_base = gm
  modified_base 9: mod_base = OTHER; note = 2'-O-methyladenosine
  modified_base 10: mod_base = um
  modified_base 11: mod_base = cm
  modified_base 12: mod_base = OTHER; note = 2'-fluorouridine
  modified_base 13: mod_base = um
  modified_base 14: mod_base = OTHER; note = 2'-fluoroadenosine
  modified_base 15: mod_base = gm
  modified_base 16: mod_base = OTHER; note = 2'-fluoroadenosine
  modified_base 17: mod_base = gm
  modified_base 18: mod_base = OTHER; note = 2'-fluorouridine
  modified_base 19: mod_base = um
  modified_base 20: mod_base = OTHER; note = 2'-O-methyladenosine
  modified_base 20^21: mod_base = OTHER; note = phosphorothioate linkage
  modified_base 21: mod_base = cm
  source 1..21: mol_type = other RNA
ttcatcagatcttagagttac

SEQ ID NO: 1085 - RNA, 21 nt, synthetic construct
  modified_base 1: mod_base = um
  modified_base 1^2: mod_base = OTHER; note = phosphorothioate linkage
  modified_base 2: mod_base = OTHER; note = 2'-fluorouridine
  modified_base 2^3: mod_base = OTHER; note = phosphorothioate linkage
  modified_base 3: mod_base = um
  modified_base 3^4: mod_base = OTHER; note = phosphorothioate linkage
  modified_base 4: mod_base = OTHER; note = 2'-fluorocytidine
  modified_base 5: mod_base = OTHER; note = 2'-O-methyladenosine
  modified_base 6: mod_base = OTHER; note = 2'-fluorouridine
  modified_base 7: mod_base = cm
  modified_base 8: mod_base = OTHER; note = 2'-O-methyladenosine
  modified_base 9: mod_base = gm
  modified_base 10: mod_base = OTHER; note = 2'-O-methyladenosine
  modified_base 11: mod_base = um
  modified_base 12: mod_base = OTHER; note = 2'-fluorocytidine
  modified_base 13: mod_base = um
  modified_base 14: mod_base = OTHER; note = 2'-fluorouridine
  modified_base 15: mod_base = OTHER; note = 2'-O-methyladenosine
  modified_base 16: mod_base = OTHER; note = 2'-fluoroguanosine
  modified_base 17: mod_base = OTHER; note = 2'-O-methyladenosine
  modified_base 18: mod_base = OTHER; note = 2'-fluoroguanosine
  modified_base 19: mod_base = um
  modified_base 20: mod_base = um
  modified_base 20^21: mod_base = OTHER; note = phosphorothioate linkage
  modified_base 21: mod_base = gm
  source 1..21: mol_type = other RNA
tttcatcagatcttagagttg

SEQ ID NO: 1086 - RNA, 21 nt, synthetic construct
  modified_base 1: mod_base = um
  modified_base 1^2: mod_base = OTHER; note = phosphorothioate linkage
  modified_base 2: mod_base = OTHER; note = 2'-fluorocytidine
  modified_base 2^3: mod_base = OTHER; note = phosphorothioate linkage
  modified_base 3: mod_base = OTHER; note = 2'-O-methyladenosine
  modified_base 3^4: mod_base = OTHER; note = phosphorothioate linkage
  modified_base 4: mod_base = OTHER; note = 2'-fluoroadenosine
  modified_base 5: mod_base = gm
  modified_base 6: mod_base = OTHER; note = 2'-fluorouridine
  modified_base 7: mod_base = um
  modified_base 8: mod_base = um
  modified_base 9: mod_base = OTHER; note = 2'-O-methyladenosine
  modified_base 10: mod_base = gm
  modified_base 11: mod_base = um
  modified_base 12: mod_base = OTHER; note = 2'-fluorocytidine
  modified_base 13: mod_base = OTHER; note = 2'-O-methyladenosine
  modified_base 14: mod_base = OTHER; note = 2'-fluoroadenosine
  modified_base 15: mod_base = cm
  modified_base 16: mod_base = OTHER; note = 2'-fluorouridine
  modified_base 17: mod_base = um
  modified_base 18: mod_base = OTHER; note = 2'-fluorocytidine
  modified_base 19: mod_base = cm
  modified_base 20: mod_base = cm
  modified_base 20^21: mod_base = OTHER; note = phosphorothioate linkage
  modified_base 21: mod_base = OTHER; note = 2'-O-methyladenosine
  source 1..21: mol_type = other RNA
tcaagtttagtcaacttccca

SEQ ID NO: 1087 - RNA, 21 nt, synthetic construct
  modified_base 1: mod_base = um
  modified_base 1^2: mod_base = OTHER; note = phosphorothioate linkage
  modified_base 2: mod_base = OTHER; note = 2'-fluoroadenosine
  modified_base 2^3: mod_base = OTHER; note = phosphorothioate linkage
  modified_base 3: mod_base = gm
  modified_base 3^4: mod_base = OTHER; note = phosphorothioate linkage
  modified_base 4: mod_base = OTHER; note = 2'-fluorocytidine
  modified_base 5: mod_base = um
  modified_base 6: mod_base = OTHER; note = 2'-fluorouridine
  modified_base 7: mod_base = cm
  modified_base 8: mod_base = cm
  modified_base 9: mod_base = OTHER; note = 2'-O-methyladenosine
  modified_base 10: mod_base = um
  modified_base 11: mod_base = um
  modified_base 12: mod_base = OTHER; note = 2'-fluorouridine
  modified_base 13: mod_base = OTHER; note = 2'-O-methyladenosine
  modified_base 14: mod_base = OTHER; note = 2'-fluorouridine
  modified_base 15: mod_base = um
  modified_base 16: mod_base = OTHER; note = 2'-fluorocytidine
  modified_base 17: mod_base = OTHER; note = 2'-O-methyladenosine
  modified_base 18: mod_base = OTHER; note = 2'-fluorocytidine
  modified_base 19: mod_base = OTHER; note = 2'-O-methyladenosine
  modified_base 20: mod_base = gm
  modified_base 20^21: mod_base = OTHER; note = phosphorothioate linkage
  modified_base 21: mod_base = cm
  source 1..21: mol_type = other RNA
tagcttccatttattcacagc

SEQ ID NO: 1088 - RNA, 21 nt, synthetic construct
  modified_base 1: mod_base = OTHER; note = 2'-O-methyladenosine
  modified_base 1^2: mod_base = OTHER; note = phosphorothioate linkage
  modified_base 2: mod_base = OTHER; note = 2'-fluoroguanosine
  modified_base 2^3: mod_base = OTHER; note = phosphorothioate linkage
  modified_base 3: mod_base = um
  modified_base 3^4: mod_base = OTHER; note = phosphorothioate linkage
  modified_base 4: mod_base = gm
  modified_base 5: mod_base = um
  modified_base 6: mod_base = um
  modified_base 7: mod_base = gm
  modified_base 8: mod_base = um
  modified_base 9: mod_base = cm
  modified_base 10: mod_base = OTHER; note = 2'-O-methyladenosine
  modified_base 11: mod_base = um
  modified_base 12: mod_base = OTHER; note = 2'-fluorouridine
  modified_base 13: mod_base = um
  modified_base 14: mod_base = OTHER; note = 2'-fluorouridine
  modified_base 15: mod_base = um
  modified_base 16: mod_base = OTHER; note = 2'-fluoroguanosine
  modified_base 17: mod_base = OTHER; note = 2'-O-methyladenosine
  modified_base 18: mod_base = gm
  modified_base 19: mod_base = OTHER; note = 2'-O-methyladenosine
  modified_base 20: mod_base = OTHER; note = 2'-O-methyladenosine
  modified_base 20^21: mod_base = OTHER; note = phosphorothioate linkage
  modified_base 21: mod_base = cm
  source 1..21: mol_type = other RNA
agtgttgtcatttttgagaac

SEQ ID NO: 1089 - RNA, 21 nt, synthetic construct
  modified_base 1: mod_base = OTHER; note = 5'-cyclopropyl phosphonate-2'-O-methyladenosine
  modified_base 1^2: mod_base = OTHER; note = phosphorothioate linkage
  modified_base 2: mod_base = OTHER; note = 2'-fluoroguanosine
  modified_base 2^3: mod_base = OTHER; note = phosphorothioate linkage
  modified_base 3: mod_base = um
  modified_base 3^4: mod_base = OTHER; note = phosphorothioate linkage
  modified_base 4: mod_base = gm
  modified_base 5: mod_base = um
  modified_base 6: mod_base = um
  modified_base 7: mod_base = gm
  modified_base 8: mod_base = um
  modified_base 9: mod_base = cm
  modified_base 10: mod_base = OTHER; note = 2'-O-methyladenosine
  modified_base 11: mod_base = um
  modified_base 12: mod_base = OTHER; note = 2'-fluorouridine
  modified_base 13: mod_base = um
  modified_base 14: mod_base = OTHER; note = 2'-fluorouridine
  modified_base 15: mod_base = um
  modified_base 16: mod_base = OTHER; note = 2'-fluoroguanosine
  modified_base 17: mod_base = OTHER; note = 2'-O-methyladenosine
  modified_base 18: mod_base = gm
  modified_base 19: mod_base = OTHER; note = 2'-O-methyladenosine
  modified_base 20: mod_base = OTHER; note = 2'-O-methyladenosine
  modified_base 20^21: mod_base = OTHER; note = phosphorothioate linkage
  modified_base 21: mod_base = cm
  source 1..21: mol_type = other RNA
agtgttgtcatttttgagaac

SEQ ID NO: 1090 - RNA, 21 nt, synthetic construct
  modified_base 1: mod_base = um
  modified_base 1^2: mod_base = OTHER; note = phosphorothioate linkage
  modified_base 2: mod_base = OTHER; note = 2'-fluoroadenosine
  modified_base 2^3: mod_base = OTHER; note = phosphorothioate linkage
  modified_base 3: mod_base = um
  modified_base 3^4: mod_base = OTHER; note = phosphorothioate linkage
  modified_base 4: mod_base = um
  modified_base 5: mod_base = gm
  modified_base 6: mod_base = OTHER; note = 2'-O-methyladenosine
  modified_base 7: mod_base = OTHER; note = 2'-O-methyladenosine
  modified_base 8: mod_base = gm
  modified_base 9: mod_base = cm
  modified_base 10: mod_base = OTHER; note = 2'-O-methyladenosine
  modified_base 11: mod_base = um
  modified_base 12: mod_base = OTHER; note = 2'-fluorouridine
  modified_base 13: mod_base = gm
  modified_base 14: mod_base = OTHER; note = 2'-fluoroadenosine
  modified_base 15: mod_base = gm
  modified_base 16: mod_base = OTHER; note = 2'-fluoroadenosine
  modified_base 17: mod_base = cm
  modified_base 18: mod_base = OTHER; note = 2'-O-methyladenosine
  modified_base 19: mod_base = cm
  modified_base 20: mod_base = cm
  modified_base 20^21: mod_base = OTHER; note = phosphorothioate linkage
  modified_base 21: mod_base = OTHER; note = 2'-O-methyladenosine
  source 1..21: mol_type = other RNA
tattgaagcattgagacacca

SEQ ID NO: 1091 - RNA, 21 nt, synthetic construct
  modified_base 1: mod_base = OTHER; note = 5'-cyclopropyl phosphonate-2'-O-methyluridine
  modified_base 1^2: mod_base = OTHER; note = phosphorothioate linkage
  modified_base 2: mod_base = OTHER; note = 2'-fluoroadenosine
  modified_base 2^3: mod_base = OTHER; note = phosphorothioate linkage
  modified_base 3: mod_base = um
  modified_base 3^4: mod_base = OTHER; note = phosphorothioate linkage
  modified_base 4: mod_base = um
  modified_base 5: mod_base = gm
  modified_base 6: mod_base = OTHER; note = 2'-O-methyladenosine
  modified_base 7: mod_base = OTHER; note = 2'-O-methyladenosine
  modified_base 8: mod_base = gm
  modified_base 9: mod_base = cm
  modified_base 10: mod_base = OTHER; note = 2'-O-methyladenosine
  modified_base 11: mod_base = um
  modified_base 12: mod_base = OTHER; note = 2'-fluorouridine
  modified_base 13: mod_base = gm
  modified_base 14: mod_base = OTHER; note = 2'-fluoroadenosine
  modified_base 15: mod_base = gm
  modified_base 16: mod_base = OTHER; note = 2'-fluoroadenosine
  modified_base 17: mod_base = cm
  modified_base 18: mod_base = OTHER; note = 2'-O-methyladenosine
  modified_base 19: mod_base = cm
  modified_base 20: mod_base = cm
  modified_base 20^21: mod_base = OTHER; note = phosphorothioate linkage
  modified_base 21: mod_base = OTHER; note = 2'-O-methyladenosine
  source 1..21: mol_type = other RNA
tattgaagcattgagacacca

SEQ ID NO: 1092 - RNA, 21 nt, synthetic construct
  modified_base 1: mod_base = OTHER; note = 2'-O-methyladenosine
  modified_base 1^2: mod_base = OTHER; note = phosphorothioate linkage
  modified_base 2: mod_base = OTHER; note = 2'-fluoroadenosine
  modified_base 2^3: mod_base = OTHER; note = phosphorothioate linkage
  modified_base 3: mod_base = gm
  modified_base 3^4: mod_base = OTHER; note = phosphorothioate linkage
  modified_base 4: mod_base = OTHER; note = 2'-O-methyladenosine
  modified_base 5: mod_base = OTHER; note = 2'-O-methyladenosine
  modified_base 6: mod_base = cm
  modified_base 7: mod_base = um
  modified_base 8: mod_base = OTHER; note = 2'-O-methyladenosine
  modified_base 9: mod_base = um
  modified_base 10: mod_base = um
  modified_base 11: mod_base = cm
  modified_base 12: mod_base = OTHER; note = 2'-fluorocytidine
  modified_base 13: mod_base = OTHER; note = 2'-O-methyladenosine
  modified_base 14: mod_base = OTHER; note = 2'-fluorouridine
  modified_base 15: mod_base = OTHER; note = 2'-O-methyladenosine
  modified_base 16: mod_base = OTHER; note = 2'-fluoroadenosine
  modified_base 17: mod_base = um
  modified_base 18: mod_base = cm
  modified_base 19: mod_base = OTHER; note = 2'-O-methyladenosine
  modified_base 20: mod_base = gm
  modified_base 20^21: mod_base = OTHER; note = phosphorothioate linkage
  modified_base 21: mod_base = cm
  source 1..21: mol_type = other RNA
aagaactattccataatcagc

SEQ ID NO: 1093 - RNA, 21 nt, synthetic construct
  modified_base 1: mod_base = OTHER; note = 5'-cyclopropyl phosphonate-2'-O-methyladenosine
  modified_base 1^2: mod_base = OTHER; note = phosphorothioate linkage
  modified_base 2: mod_base = OTHER; note = 2'-fluoroadenosine
  modified_base 2^3: mod_base = OTHER; note = phosphorothioate linkage
  modified_base 3: mod_base = gm
  modified_base 3^4: mod_base = OTHER; note = phosphorothioate linkage
  modified_base 4: mod_base = OTHER; note = 2'-O-methyladenosine
  modified_base 5: mod_base = OTHER; note = 2'-O-methyladenosine
  modified_base 6: mod_base = cm
  modified_base 7: mod_base = um
  modified_base 8: mod_base = OTHER; note = 2'-O-methyladenosine
  modified_base 9: mod_base = um
  modified_base 10: mod_base = um
  modified_base 11: mod_base = cm
  modified_base 12: mod_base = OTHER; note = 2'-fluorocytidine
  modified_base 13: mod_base = OTHER; note = 2'-O-methyladenosine
  modified_base 14: mod_base = OTHER; note = 2'-fluorouridine
  modified_base 15: mod_base = OTHER; note = 2'-O-methyladenosine
  modified_base 16: mod_base = OTHER; note = 2'-fluoroadenosine
  modified_base 17: mod_base = um
  modified_base 18: mod_base = cm
  modified_base 19: mod_base = OTHER; note = 2'-O-methyladenosine
  modified_base 20: mod_base = gm
  modified_base 20^21: mod_base = OTHER; note = phosphorothioate linkage
  modified_base 21: mod_base = cm
  source 1..21: mol_type = other RNA
aagaactattccataatcagc

SEQ ID NO: 1094 - RNA, 21 nt, synthetic construct
  modified_base 1: mod_base = OTHER; note = 2'-O-methyladenosine
  modified_base 1^2: mod_base = OTHER; note = phosphorothioate linkage
  modified_base 2: mod_base = OTHER; note = 2'-fluoroguanosine
  modified_base 2^3: mod_base = OTHER; note = phosphorothioate linkage
  modified_base 3: mod_base = OTHER; note = 2'-O-methyladenosine
  modified_base 3^4: mod_base = OTHER; note = phosphorothioate linkage
  modified_base 4: mod_base = OTHER; note = 2'-O-methyladenosine
  modified_base 5: mod_base = OTHER; note = 2'-O-methyladenosine
  modified_base 6: mod_base = gm
  modified_base 7: mod_base = OTHER; note = 2'-O-methyladenosine
  modified_base 8: mod_base = OTHER; note = 2'-O-methyladenosine
  modified_base 9: mod_base = cm
  modified_base 10: mod_base = um
  modified_base 11: mod_base = OTHER; note = 2'-O-methyladenosine
  modified_base 12: mod_base = OTHER; note = 2'-fluorouridine
  modified_base 13: mod_base = um
  modified_base 14: mod_base = OTHER; note = 2'-fluorocytidine
  modified_base 15: mod_base = cm
  modified_base 16: mod_base = OTHER; note = 2'-fluoroadenosine
  modified_base 17: mod_base = um
  modified_base 18: mod_base = OTHER; note = 2'-O-methyladenosine
  modified_base 19: mod_base = OTHER; note = 2'-O-methyladenosine
  modified_base 20: mod_base = um
  modified_base 20^21: mod_base = OTHER; note = phosphorothioate linkage
  modified_base 21: mod_base = cm
  source 1..21: mol_type = other RNA
agaaagaactattccataatc

SEQ ID NO: 1095 - RNA, 21 nt, synthetic construct
  modified_base 1: mod_base = OTHER; note = 5'-cyclopropyl phosphonate-2'-O-methyladenosine
  modified_base 1^2: mod_base = OTHER; note = phosphorothioate linkage
  modified_base 2: mod_base = OTHER; note = 2'-fluoroguanosine
  modified_base 2^3: mod_base = OTHER; note = phosphorothioate linkage
  modified_base 3: mod_base = OTHER; note = 2'-O-methyladenosine
  modified_base 3^4: mod_base = OTHER; note = phosphorothioate linkage
  modified_base 4: mod_base = OTHER; note = 2'-O-methyladenosine
  modified_base 5: mod_base = OTHER; note = 2'-O-methyladenosine
  modified_base 6: mod_base = gm
  modified_base 7: mod_base = OTHER; note = 2'-O-methyladenosine
  modified_base 8: mod_base = OTHER; note = 2'-O-methyladenosine
  modified_base 9: mod_base = cm
  modified_base 10: mod_base = um
  modified_base 11: mod_base = OTHER; note = 2'-O-methyladenosine
  modified_base 12: mod_base = OTHER; note = 2'-fluorouridine
  modified_base 13: mod_base = um
  modified_base 14: mod_base = OTHER; note = 2'-fluorocytidine
  modified_base 15: mod_base = cm
  modified_base 16: mod_base = OTHER; note = 2'-fluoroadenosine
  modified_base 17: mod_base = um
  modified_base 18: mod_base = OTHER; note = 2'-O-methyladenosine
  modified_base 19: mod_base = OTHER; note = 2'-O-methyladenosine
  modified_base 20: mod_base = um
  modified_base 20^21: mod_base = OTHER; note = phosphorothioate linkage
  modified_base 21: mod_base = cm
  source 1..21: mol_type = other RNA
agaaagaactattccataatc

SEQ ID NO: 1096 - RNA, 21 nt, synthetic construct
  modified_base 1: mod_base = um
  modified_base 1^2: mod_base = OTHER; note = phosphorothioate linkage
  modified_base 2: mod_base = OTHER; note = 2'-fluorouridine
  modified_base 2^3: mod_base = OTHER; note = phosphorothioate linkage
  modified_base 3: mod_base = gm
  modified_base 3^4: mod_base = OTHER; note = phosphorothioate linkage
  modified_base 4: mod_base = OTHER; note = 2'-fluoroadenosine
  modified_base 5: mod_base = um
  modified_base 6: mod_base = OTHER; note = 2'-fluorocytidine
  modified_base 7: mod_base = OTHER; note = 2'-O-methyladenosine
  modified_base 8: mod_base = cm
  modified_base 9: mod_base = OTHER; note = 2'-O-methyladenosine
  modified_base 10: mod_base = OTHER; note = 2'-O-methyladenosine
  modified_base 11: mod_base = gm
  modified_base 12: mod_base = OTHER; note = 2'-fluorocytidine
  modified_base 13: mod_base = cm
  modified_base 14: mod_base = OTHER; note = 2'-fluoroadenosine
  modified_base 15: mod_base = OTHER; note = 2'-O-methyladenosine
  modified_base 16: mod_base = OTHER; note = 2'-fluoroadenosine
  modified_base 17: mod_base = OTHER; note = 2'-O-methyladenosine
  modified_base 18: mod_base = OTHER; note = 2'-fluorocytidine
  modified_base 19: mod_base = cm
  modified_base 20: mod_base = um
  modified_base 20^21: mod_base = OTHER; note = phosphorothioate linkage
  modified_base 21: mod_base = gm
  source 1..21: mol_type = other RNA
ttgatcacaagccaaaacctg

SEQ ID NO: 1097 - RNA, 21 nt, synthetic construct
  modified_base 1: mod_base = um
  modified_base 1^2: mod_base = OTHER; note = phosphorothioate linkage
  modified_base 2: mod_base = OTHER; note = 2'-fluorocytidine
  modified_base 2^3: mod_base = OTHER; note = phosphorothioate linkage
  modified_base 3: mod_base = OTHER; note = 2'-O-methyladenosine
  modified_base 3^4: mod_base = OTHER; note = phosphorothioate linkage
  modified_base 4: mod_base = OTHER; note = 2'-fluorouridine
  modified_base 5: mod_base = OTHER; note = 2'-O-methyladenosine
  modified_base 6: mod_base = OTHER; note = 2'-fluoroguanosine
  modified_base 7: mod_base = OTHER; note = 2'-O-methyladenosine
  modified_base 8: mod_base = cm
  modified_base 9: mod_base = OTHER; note = 2'-O-methyladenosine
  modified_base 10: mod_base = um
  modified_base 11: mod_base = cm
  modified_base 12: mod_base = OTHER; note = 2'-fluoroguanosine
  modified_base 13: mod_base = cm
  modified_base 14: mod_base = OTHER; note = 2'-fluoroadenosine
  modified_base 15: mod_base = um
  modified_base 16: mod_base = OTHER; note = 2'-fluorocytidine
  modified_base 17: mod_base = cm
  modified_base 18: mod_base = OTHER; note = 2'-fluorouridine
  modified_base 19: mod_base = gm
  modified_base 20: mod_base = OTHER; note = 2'-O-methyladenosine
  modified_base 20^21: mod_base = OTHER; note = phosphorothioate linkage
  modified_base 21: mod_base = OTHER; note = 2'-O-methyladenosine
  source 1..21: mol_type = other RNA
tcatagacatcgcatcctgaa

SEQ ID NO: 1098 - RNA, 21 nt, synthetic construct
  modified_base 1: mod_base = um
  modified_base 1^2: mod_base = OTHER; note = phosphorothioate linkage
  modified_base 2: mod_base = OTHER; note = 2'-fluorocytidine
  modified_base 2^3: mod_base = OTHER; note = phosphorothioate linkage
  modified_base 3: mod_base = OTHER; note = 2'-O-methyladenosine
  modified_base 3^4: mod_base = OTHER; note = phosphorothioate linkage
  modified_base 4: mod_base = OTHER; note = 2'-fluoroadenosine
  modified_base 5: mod_base = OTHER; note = 2'-O-methyladenosine
  modified_base 6: mod_base = OTHER; note = 2'-fluoroguanosine
  modified_base 7: mod_base = OTHER; note = 2'-O-methyladenosine
  modified_base 8: mod_base = gm
  modified_base 9: mod_base = um
  modified_base 10: mod_base = gm
  modified_base 11: mod_base = gm
  modified_base 12: mod_base = OTHER; note = 2'-fluorouridine
  modified_base 13: mod_base = gm
  modified_base 14: mod_base = OTHER; note = 2'-fluoroadenosine
  modified_base 15: mod_base = um
  modified_base 16: mod_base = OTHER; note = 2'-fluorouridine
  modified_base 17: mod_base = um
  modified_base 18: mod_base = OTHER; note = 2'-fluorouridine
  modified_base 19: mod_base = cm
  modified_base 20: mod_base = cm
  modified_base 20^21: mod_base = OTHER; note = phosphorothioate linkage
  modified_base 21: mod_base = OTHER; note = 2'-O-methyladenosine
  source 1..21: mol_type = other RNA
tcaaagagtggtgattttcca

SEQ ID NO: 1099 - RNA, 21 nt, synthetic construct
  modified_base 1: mod_base = um
  modified_base 1^2: mod_base = OTHER; note = phosphorothioate linkage
  modified_base 2: mod_base = OTHER; note = 2'-fluorouridine
  modified_base 2^3: mod_base = OTHER; note = phosphorothioate linkage
  modified_base 3: mod_base = cm
  modified_base 3^4: mod_base = OTHER; note = phosphorothioate linkage
  modified_base 4: mod_base = OTHER; note = 2'-fluorouridine
  modified_base 5: mod_base = gm
  modified_base 6: mod_base = OTHER; note = 2'-fluoroadenosine
  modified_base 7: mod_base = OTHER; note = 2'-O-methyladenosine
  modified_base 8: mod_base = OTHER; note = 2'-O-methyladenosine
  modified_base 9: mod_base = cm
  modified_base 10: mod_base = OTHER; note = 2'-O-methyladenosine
  modified_base 11: mod_base = cm
  modified_base 12: mod_base = OTHER; note = 2'-fluorocytidine
  modified_base 13: mod_base = OTHER; note = 2'-O-methyladenosine
  modified_base 14: mod_base = OTHER; note = 2'-fluorouridine
  modified_base 15: mod_base = gm
  modified_base 16: mod_base = OTHER; note = 2'-fluorocytidine
  modified_base 17: mod_base = um
  modified_base 18: mod_base = OTHER; note = 2'-fluorouridine
  modified_base 19: mod_base = cm
  modified_base 20: mod_base = OTHER; note = 2'-O-methyladenosine
  modified_base 20^21: mod_base = OTHER; note = phosphorothioate linkage
  modified_base 21: mod_base = OTHER; note = 2'-O-methyladenosine
  source 1..21: mol_type = other RNA
ttctgaaacaccatgcttcaa

SEQ ID NO: 1100 - RNA, 21 nt, synthetic construct
  modified_base 1: mod_base = um
  modified_base 1^2: mod_base = OTHER; note = phosphorothioate linkage
  modified_base 2: mod_base = OTHER; note = 2'-fluorocytidine
  modified_base 2^3: mod_base = OTHER; note = phosphorothioate linkage
  modified_base 3: mod_base = OTHER; note = 2'-O-methyladenosine
  modified_base 3^4: mod_base = OTHER; note = phosphorothioate linkage
  modified_base 4: mod_base = OTHER; note = 2'-fluoroguanosine
  modified_base 5: mod_base = OTHER; note = 2'-O-methyladenosine
  modified_base 6: mod_base = OTHER; note = 2'-fluoroadenosine
  modified_base 7: mod_base = um
  modified_base 8: mod_base = cm
  modified_base 9: mod_base = cm
  modified_base 10: mod_base = um
  modified_base 11: mod_base = gm
  modified_base 12: mod_base = OTHER; note = 2'-fluorouridine
  modified_base 13: mod_base = cm
  modified_base 14: mod_base = OTHER; note = 2'-fluorouridine
  modified_base 15: mod_base = um
  modified_base 16: mod_base = OTHER; note = 2'-fluoroguanosine
  modified_base 17: mod_base = um
  modified_base 18: mod_base = OTHER; note = 2'-fluorocytidine
  modified_base 19: mod_base = OTHER; note = 2'-O-methyladenosine
  modified_base 20: mod_base = um
  modified_base 20^21: mod_base = OTHER; note = phosphorothioate linkage
  modified_base 21: mod_base = um
  source 1..21: mol_type = other RNA
tcagaatcctgtcttgtcatt

SEQ ID NO: 1101 - RNA, 21 nt, synthetic construct
  modified_base 1: mod_base = um
  modified_base 1^2: mod_base = OTHER; note = phosphorothioate linkage
  modified_base 2: mod_base = OTHER; note = 2'-fluorocytidine
  modified_base 2^3: mod_base = OTHER; note = phosphorothioate linkage
  modified_base 3: mod_base = OTHER; note = 2'-O-methyladenosine
  modified_base 3^4: mod_base = OTHER; note = phosphorothioate linkage
  modified_base 4: mod_base = OTHER; note = 2'-fluoroadenosine
  modified_base 5: mod_base = um
  modified_base 6: mod_base = OTHER; note = 2'-fluoroguanosine
  modified_base 7: mod_base = cm
  modified_base 8: mod_base = um
  modified_base 9: mod_base = gm
  modified_base 10: mod_base = um
  modified_base 11: mod_base = cm
  modified_base 12: mod_base = OTHER; note = 2'-fluorouridine
  modified_base 13: mod_base = gm
  modified_base 14: mod_base = OTHER; note = 2'-fluoroadenosine
  modified_base 15: mod_base = gm
  modified_base 16: mod_base = OTHER; note = 2'-fluoroadenosine
  modified_base 17: mod_base = OTHER; note = 2'-O-methyladenosine
  modified_base 18: mod_base = OTHER; note = 2'-fluoroguanosine
  modified_base 19: mod_base = cm
  modified_base 20: mod_base = OTHER; note = 2'-O-methyladenosine
  modified_base 20^21: mod_base = OTHER; note = phosphorothioate linkage
  modified_base 21: mod_base = gm
  source 1..21: mol_type = other RNA
tcaatgctgtctgagaagcag

SEQ ID NO: 1102 - RNA, 21 nt, synthetic construct
  modified_base 1: mod_base = um
  modified_base 1^2: mod_base = OTHER; note = phosphorothioate linkage
  modified_base 2: mod_base = OTHER; note = 2'-fluorocytidine
  modified_base 2^3: mod_base = OTHER; note = phosphorothioate linkage
  modified_base 3: mod_base = cm
  modified_base 3^4: mod_base = OTHER; note = phosphorothioate linkage
  modified_base 4: mod_base = OTHER; note = 2'-fluorouridine
  modified_base 5: mod_base = um
  modified_base 6: mod_base = OTHER; note = 2'-fluorouridine
  modified_base 7: mod_base = OTHER; note = 2'-O-methyladenosine
  modified_base 8: mod_base = OTHER; note = 2'-O-methyladenosine
  modified_base 9: mod_base = OTHER; note = 2'-O-methyladenosine
  modified_base 10: mod_base = gm
  modified_base 11: mod_base = gm
  modified_base 12: mod_base = OTHER; note = 2'-fluorouridine
  modified_base 13: mod_base = um
  modified_base 14: mod_base = OTHER; note = 2'-fluorouridine
  modified_base 15: mod_base = um
  modified_base 16: mod_base = OTHER; note = 2'-fluorocytidine
  modified_base 17: mod_base = OTHER; note = 2'-O-methyladenosine
  modified_base 18: mod_base = OTHER; note = 2'-fluoroguanosine
  modified_base 19: mod_base = um
  modified_base 20: mod_base = OTHER; note = 2'-O-methyladenosine
  modified_base 20^21: mod_base = OTHER; note = phosphorothioate linkage
  modified_base 21: mod_base = gm
  source 1..21: mol_type = other RNA
tcctttaaaggttttcagtag

SEQ ID NO: 1103 - RNA, 21 nt, synthetic construct
  modified_base 1: mod_base = um
  modified_base 1^2: mod_base = OTHER; note = phosphorothioate linkage
  modified_base 2: mod_base = OTHER; note = 2'-fluoroadenosine
  modified_base 2^3: mod_base = OTHER; note = phosphorothioate linkage
  modified_base 3: mod_base = cm
  modified_base 3^4: mod_base = OTHER; note = phosphorothioate linkage
  modified_base 4: mod_base = OTHER; note = 2'-fluorouridine
  modified_base 5: mod_base = um
  modified_base 6: mod_base = OTHER; note = 2'-fluorocytidine
  modified_base 7: mod_base = OTHER; note = 2'-O-methyladenosine
  modified_base 8: mod_base = um
  modified_base 9: mod_base = cm
  modified_base 10: mod_base = OTHER; note = 2'-O-methyladenosine
  modified_base 11: mod_base = gm
  modified_base 12: mod_base = OTHER; note = 2'-fluoroadenosine
  modified_base 13: mod_base = um
  modified_base 14: mod_base = OTHER; note = 2'-fluorocytidine
  modified_base 15: mod_base = um
  modified_base 16: mod_base = OTHER; note = 2'-fluorouridine
  modified_base 17: mod_base = OTHER; note = 2'-O-methyladenosine
  modified_base 18: mod_base = OTHER; note = 2'-fluoroguanosine
  modified_base 19: mod_base = OTHER; note = 2'-O-methyladenosine
  modified_base 20: mod_base = gm
  modified_base 20^21: mod_base = OTHER; note = phosphorothioate linkage
  modified_base 21: mod_base = um
  source 1..21: mol_type = other RNA
tacttcatcagatcttagagt

SEQ ID NO: 1104 - RNA, 21 nt, synthetic construct
  modified_base 1: mod_base = um
  modified_base 1^2: mod_base = OTHER; note = phosphorothioate linkage
  modified_base 2: mod_base = OTHER; note = 2'-fluoroadenosine
  modified_base 2^3: mod_base = OTHER; note = phosphorothioate linkage
  modified_base 3: mod_base = OTHER; note = 2'-O-methyladenosine
  modified_base 3^4: mod_base = OTHER; note = phosphorothioate linkage
  modified_base 4: mod_base = OTHER; note = 2'-fluoroguanosine
  modified_base 5: mod_base = um
  modified_base 6: mod_base = OTHER; note = 2'-fluorouridine
  modified_base 7: mod_base = um
  modified_base 8: mod_base = OTHER; note = 2'-O-methyladenosine
  modified_base 9: mod_base = gm
  modified_base 10: mod_base = um
  modified_base 11: mod_base = cm
  modified_base 12: mod_base = OTHER; note = 2'-fluoroadenosine
  modified_base 13: mod_base = OTHER; note = 2'-O-methyladenosine
  modified_base 14: mod_base = OTHER; note = 2'-fluorocytidine
  modified_base 15: mod_base = um
  modified_base 16: mod_base = OTHER; note = 2'-fluorouridine
  modified_base 17: mod_base = cm
  modified_base 18: mod_base = OTHER; note = 2'-fluorocytidine
  modified_base 19: mod_base = cm
  modified_base 20: mod_base = OTHER; note = 2'-O-methyladenosine
  modified_base 20^21: mod_base = OTHER; note = phosphorothioate linkage
  modified_base 21: mod_base = OTHER; note = 2'-O-methyladenosine
  source 1..21: mol_type = other RNA
taagtttagtcaacttcccaa

SEQ ID NO: 1105 - RNA, 21 nt, synthetic construct
  modified_base 1: mod_base = um
  modified_base 1^2: mod_base = OTHER; note = phosphorothioate linkage
  modified_base 2: mod_base = OTHER; note = 2'-fluoroguanosine
  modified_base 2^3: mod_base = OTHER; note = phosphorothioate linkage
  modified_base 3: mod_base = um
  modified_base 3^4: mod_base = OTHER; note = phosphorothioate linkage
  modified_base 4: mod_base = OTHER; note = 2'-fluoroguanosine
  modified_base 5: mod_base = um
  modified_base 6: mod_base = OTHER; note = 2'-fluoroadenosine
  modified_base 7: mod_base = gm
  modified_base 8: mod_base = gm
  modified_base 9: mod_base = cm
  modified_base 10: mod_base = um
  modified_base 11: mod_base = gm
  modified_base 12: mod_base = OTHER; note = 2'-fluorocytidine
  modified_base 13: mod_base = OTHER; note = 2'-O-methyladenosine
  modified_base 14: mod_base = OTHER; note = 2'-fluorocytidine
  modified_base 15: mod_base = um
  modified_base 16: mod_base = OTHER; note = 2'-fluoroguanosine
  modified_base 17: mod_base = OTHER; note = 2'-O-methyladenosine
  modified_base 18: mod_base = OTHER; note = 2'-fluoroguanosine
  modified_base 19: mod_base = OTHER; note = 2'-O-methyladenosine
  modified_base 20: mod_base = gm
  modified_base 20^21: mod_base = OTHER; note = phosphorothioate linkage
  modified_base 21: mod_base = um
  source 1..21: mol_type = other RNA
tgtgtaggctgcactgagagt

SEQ ID NO: 1106 - RNA, 21 nt, synthetic construct
  modified_base 1: mod_base = um
  modified_base 1^2: mod_base = OTHER; note = phosphorothioate linkage
  modified_base 2: mod_base = OTHER; note = 2'-fluorouridine
  modified_base 2^3: mod_base = OTHER; note = phosphorothioate linkage
  modified_base 3: mod_base = gm
  modified_base 3^4: mod_base = OTHER; note = phosphorothioate linkage
  modified_base 4: mod_base = OTHER; note = 2'-fluorouridine
  modified_base 5: mod_base = gm
  modified_base 6: mod_base = OTHER; note = 2'-fluorouridine
  modified_base 7: mod_base = OTHER; note = 2'-O-methyladenosine
  modified_base 8: mod_base = gm
  modified_base 9: mod_base = gm
  modified_base 10: mod_base = cm
  modified_base 11: mod_base = um
  modified_base 12: mod_base = OTHER; note = 2'-fluoroguanosine
  modified_base 13: mod_base = cm
  modified_base 14: mod_base = OTHER; note = 2'-fluoroadenosine
  modified_base 15: mod_base = cm
  modified_base 16: mod_base = OTHER; note = 2'-fluorouridine
  modified_base 17: mod_base = gm
  modified_base 18: mod_base = OTHER; note = 2'-fluoroadenosine
  modified_base 19: mod_base = gm
  modified_base 20: mod_base = OTHER; note = 2'-O-methyladenosine
  modified_base 20^21: mod_base = OTHER; note = phosphorothioate linkage
  modified_base 21: mod_base = gm
  source 1..21: mol_type = other RNA
ttgtgtaggctgcactgagag

SEQ ID NO: 1107 - RNA, 21 nt, synthetic construct
  modified_base 1: mod_base = um
  modified_base 1^2: mod_base = OTHER; note = phosphorothioate linkage
  modified_base 2: mod_base = OTHER; note = 2'-fluorocytidine
  modified_base 2^3: mod_base = OTHER; note = phosphorothioate linkage
  modified_base 3: mod_base = um
  modified_base 3^4: mod_base = OTHER; note = phosphorothioate linkage
  modified_base 4: mod_base = OTHER; note = 2'-fluorouridine
  modified_base 5: mod_base = um
  modified_base 6: mod_base = OTHER; note = 2'-fluoroguanosine
  modified_base 7: mod_base = um
  modified_base 8: mod_base = gm
  modified_base 9: mod_base = um
  modified_base 10: mod_base = OTHER; note = 2'-O-methyladenosine
  modified_base 11: mod_base = gm
  modified_base 12: mod_base = OTHER; note = 2'-fluoroguanosine
  modified_base 13: mod_base = cm
  modified_base 14: mod_base = OTHER; note = 2'-fluorouridine
  modified_base 15: mod_base = gm
  modified_base 16: mod_base = OTHER; note = 2'-fluorocytidine
  modified_base 17: mod_base = OTHER; note = 2'-O-methyladenosine
  modified_base 18: mod_base = OTHER; note = 2'-fluorocytidine
  modified_base 19: mod_base = um
  modified_base 20: mod_base = gm
  modified_base 20^21: mod_base = OTHER; note = phosphorothioate linkage
  modified_base 21: mod_base = OTHER; note = 2'-O-methyladenosine
  source 1..21: mol_type = other RNA
tctttgtgtaggctgcactga

SEQ ID NO: 1108 - RNA, 21 nt, synthetic construct
  modified_base 1: mod_base = um
  modified_base 1^2: mod_base = OTHER; note = phosphorothioate linkage
  modified_base 2: mod_base = OTHER; note = 2'-fluorouridine
  modified_base 2^3: mod_base = OTHER; note = phosphorothioate linkage
  modified_base 3: mod_base = cm
  modified_base 3^4: mod_base = OTHER; note = phosphorothioate linkage
  modified_base 4: mod_base = OTHER; note = 2'-fluorocytidine
  modified_base 5: mod_base = um
  modified_base 6: mod_base = OTHER; note = 2'-fluorouridine
  modified_base 7: mod_base = um
  modified_base 8: mod_base = gm
  modified_base 9: mod_base = um
  modified_base 10: mod_base = gm
  modified_base 11: mod_base = um
  modified_base 12: mod_base = OTHER; note = 2'-fluoroadenosine
  modified_base 13: mod_base = gm
  modified_base 14: mod_base = OTHER; note = 2'-fluoroguanosine
  modified_base 15: mod_base = cm
  modified_base 16: mod_base = OTHER; note = 2'-fluorouridine
  modified_base 17: mod_base = gm
  modified_base 18: mod_base = OTHER; note = 2'-fluorocytidine
  modified_base 19: mod_base = OTHER; note = 2'-O-methyladenosine
  modified_base 20: mod_base = cm
  modified_base 20^21: mod_base = OTHER; note = phosphorothioate linkage
  modified_base 21: mod_base = um
  source 1..21: mol_type = other RNA
ttcctttgtgtaggctgcact

SEQ ID NO: 1109 - RNA, 21 nt, synthetic construct
  modified_base 1: mod_base = um
  modified_base 1^2: mod_base = OTHER; note = phosphorothioate linkage
  modified_base 2: mod_base = OTHER; note = 2'-fluorouridine
  modified_base 2^3: mod_base = OTHER; note = phosphorothioate linkage
  modified_base 3: mod_base = cm
  modified_base 3^4: mod_base = OTHER; note = phosphorothioate linkage
  modified_base 4: mod_base = OTHER; note = 2'-fluoroguanosine
  modified_base 5: mod_base = OTHER; note = 2'-O-methyladenosine
  modified_base 6: mod_base = OTHER; note = 2'-fluoroadenosine
  modified_base 7: mod_base = gm
  modified_base 8: mod_base = um
  modified_base 9: mod_base = gm
  modified_base 10: mod_base = cm
  modified_base 11: mod_base = OTHER; note = 2'-O-methyladenosine
  modified_base 12: mod_base = OTHER; note = 2'-fluorocytidine
  modified_base 13: mod_base = cm
  modified_base 14: mod_base = OTHER; note = 2'-fluoroadenosine
  modified_base 15: mod_base = gm
  modified_base 16: mod_base = OTHER; note = 2'-fluoroguanosine
  modified_base 17: mod_base = cm
  modified_base 18: mod_base = OTHER; note = 2'-fluoroguanosine
  modified_base 19: mod_base = gm
  modified_base 20: mod_base = um
  modified_base 20^21: mod_base = OTHER; note = phosphorothioate linkage
  modified_base 21: mod_base = OTHER; note = 2'-O-methyladenosine
  source 1..21: mol_type = other RNA
ttcgaagtgcaccaggcggta

SEQ ID NO: 1110 - RNA, 21 nt, synthetic construct
  modified_base 1: mod_base = um
  modified_base 1^2: mod_base = OTHER; note = phosphorothioate linkage
  modified_base 2: mod_base = OTHER; note = 2'-fluorocytidine
  modified_base 2^3: mod_base = OTHER; note = phosphorothioate linkage
  modified_base 3: mod_base = um
  modified_base 3^4: mod_base = OTHER; note = phosphorothioate linkage
  modified_base 4: mod_base = OTHER; note = 2'-fluorocytidine
  modified_base 5: mod_base = gm
  modified_base 6: mod_base = OTHER; note = 2'-fluoroadenosine
  modified_base 7: mod_base = OTHER; note = 2'-O-methyladenosine
  modified_base 8: mod_base = gm
  modified_base 9: mod_base = um
  modified_base 10: mod_base = gm
  modified_base 11: mod_base = cm
  modified_base 12: mod_base = OTHER; note = 2'-fluoroadenosine
  modified_base 13: mod_base = cm
  modified_base 14: mod_base = OTHER; note = 2'-fluorocytidine
  modified_base 15: mod_base = OTHER; note = 2'-O-methyladenosine
  modified_base 16: mod_base = OTHER; note = 2'-fluoroguanosine
  modified_base 17: mod_base = gm
  modified_base 18: mod_base = OTHER; note = 2'-fluorocytidine
  modified_base 19: mod_base = gm
  modified_base 20: mod_base = gm
  modified_base 20^21: mod_base = OTHER; note = phosphorothioate linkage
  modified_base 21: mod_base = um
  source 1..21: mol_type = other RNA
tctcgaagtgcaccaggcggt

SEQ ID NO: 1111 - RNA, 21 nt, synthetic construct
  modified_base 1: mod_base = um
  modified_base 1^2: mod_base = OTHER; note = phosphorothioate linkage
  modified_base 2: mod_base = OTHER; note = 2'-fluoroguanosine
  modified_base 2^3: mod_base = OTHER; note = phosphorothioate linkage
  modified_base 3: mod_base = cm
  modified_base 3^4: mod_base = OTHER; note = phosphorothioate linkage
  modified_base 4: mod_base = OTHER; note = 2'-fluorouridine
  modified_base 5: mod_base = cm
  modified_base 6: mod_base = OTHER; note = 2'-fluoroguanosine
  modified_base 7: mod_base = OTHER; note = 2'-O-methyladenosine
  modified_base 8: mod_base = OTHER; note = 2'-O-methyladenosine
  modified_base 9: mod_base = gm
  modified_base 10: mod_base = um
  modified_base 11: mod_base = gm
  modified_base 12: mod_base = OTHER; note = 2'-fluorocytidine
  modified_base 13: mod_base = OTHER; note = 2'-O-methyladenosine
  modified_base 14: mod_base = OTHER; note = 2'-fluorocytidine
  modified_base 15: mod_base = cm
  modified_base 16: mod_base = OTHER; note = 2'-fluoroadenosine
  modified_base 17: mod_base = gm
  modified_base 18: mod_base = OTHER; note = 2'-fluoroguanosine
  modified_base 19: mod_base = cm
  modified_base 20: mod_base = gm
  modified_base 20^21: mod_base = OTHER; note = phosphorothioate linkage
  modified_base 21: mod_base = gm
  source 1..21: mol_type = other RNA
tgctcgaagtgcaccaggcgg

SEQ ID NO: 1112 - RNA, 21 nt, synthetic construct
  modified_base 1: mod_base = OTHER; note = 2'-O-methyladenosine
  modified_base 1^2: mod_base = OTHER; note = phosphorothioate linkage
  modified_base 2: mod_base = OTHER; note = 2'-fluoroguanosine
  modified_base 2^3: mod_base = OTHER; note = phosphorothioate linkage
  modified_base 3: mod_base = gm
  modified_base 3^4: mod_base = OTHER; note = phosphorothioate linkage
  modified_base 4: mod_base = OTHER; note = 2'-fluorocytidine
  modified_base 5: mod_base = um
  modified_base 6: mod_base = OTHER; note = 2'-fluorocytidine
  modified_base 7: mod_base = gm
  modified_base 8: mod_base = OTHER; note = 2'-O-methyladenosine
  modified_base 9: mod_base = OTHER; note = 2'-O-methyladenosine
  modified_base 10: mod_base = gm
  modified_base 11: mod_base = um
  modified_base 12: mod_base = OTHER; note = 2'-fluoroguanosine
  modified_base 13: mod_base = cm
  modified_base 14: mod_base = OTHER; note = 2'-fluoroadenosine
  modified_base 15: mod_base = cm
  modified_base 16: mod_base = OTHER; note = 2'-fluorocytidine
  modified_base 17: mod_base = OTHER; note = 2'-O-methyladenosine
  modified_base 18: mod_base = OTHER; note = 2'-fluoroguanosine
  modified_base 19: mod_base = gm
  modified_base 20: mod_base = cm
  modified_base 20^21: mod_base = OTHER; note = phosphorothioate linkage
  modified_base 21: mod_base = gm
  source 1..21: mol_type = other RNA
aggctcgaagtgcaccaggcg

SEQ ID NO: 1113 - RNA, 21 nt, synthetic construct
  modified_base 1: mod_base = OTHER; note = 2'-O-methyladenosine
  modified_base 1^2: mod_base = OTHER; note = phosphorothioate linkage
  modified_base 2: mod_base = OTHER; note = 2'-fluoroadenosine
  modified_base 2^3: mod_base = OTHER; note = phosphorothioate linkage
  modified_base 3: mod_base = cm
  modified_base 3^4: mod_base = OTHER; note = phosphorothioate linkage
  modified_base 4: mod_base = OTHER; note = 2'-fluorouridine
  modified_base 5: mod_base = cm
  modified_base 6: mod_base = OTHER; note = 2'-fluorouridine
  modified_base 7: mod_base = um
  modified_base 8: mod_base = cm
  modified_base 9: mod_base = OTHER; note = 2'-O-methyladenosine
  modified_base 10: mod_base = gm
  modified_base 11: mod_base = um
  modified_base 12: mod_base = OTHER; note = 2'-fluoroguanosine
  modified_base 13: mod_base = um
  modified_base 14: mod_base = OTHER; note = 2'-fluorouridine
  modified_base 15: mod_base = um
  modified_base 16: mod_base = OTHER; note = 2'-fluorocytidine
  modified_base 17: mod_base = cm
  modified_base 18: mod_base = OTHER; note = 2'-fluoroadenosine
  modified_base 19: mod_base = gm
  modified_base 20: mod_base = cm
  modified_base 20^21: mod_base = OTHER; note = phosphorothioate linkage
  modified_base 21: mod_base = gm
  source 1..21: mol_type = other RNA
aactcttcagtgtttccagcg

SEQ ID NO: 1114 - RNA, 21 nt, synthetic construct
  modified_base 1: mod_base = um
  modified_base 1^2: mod_base = OTHER; note = phosphorothioate linkage
  modified_base 2: mod_base = OTHER; note = 2'-fluoroadenosine
  modified_base 2^3: mod_base = OTHER; note = phosphorothioate linkage
  modified_base 3: mod_base = cm
  modified_base 3^4: mod_base = OTHER; note = phosphorothioate linkage
  modified_base 4: mod_base = OTHER; note = 2'-fluoroadenosine
  modified_base 5: mod_base = gm
  modified_base 6: mod_base = OTHER; note = 2'-fluoroguanosine
  modified_base 7: mod_base = gm
  modified_base 8: mod_base = um
  modified_base 9: mod_base = cm
  modified_base 10: mod_base = um
  modified_base 11: mod_base = cm
  modified_base 12: mod_base = OTHER; note = 2'-fluorocytidine
  modified_base 13: mod_base = cm
  modified_base 14: mod_base = OTHER; note = 2'-fluoroadenosine
  modified_base 15: mod_base = cm
  modified_base 16: mod_base = OTHER; note = 2'-fluorouridine
  modified_base 17: mod_base = um
  modified_base 18: mod_base = OTHER; note = 2'-fluorouridine
  modified_base 19: mod_base = gm
  modified_base 20: mod_base = OTHER; note = 2'-O-methyladenosine
  modified_base 20^21: mod_base = OTHER; note = phosphorothioate linkage
  modified_base 21: mod_base = um
  source 1..21: mol_type = other RNA
tacagggtctcccactttgat

SEQ ID NO: 1115 - RNA, 21 nt, synthetic construct
  modified_base 1: mod_base = OTHER; note = 2'-O-methyladenosine
  modified_base 1^2: mod_base = OTHER; note = phosphorothioate linkage
  modified_base 2: mod_base = OTHER; note = 2'-fluorocytidine
  modified_base 2^3: mod_base = OTHER; note = phosphorothioate linkage
  modified_base 3: mod_base = OTHER; note = 2'-O-methyladenosine
  modified_base 3^4: mod_base = OTHER; note = phosphorothioate linkage
  modified_base 4: mod_base = OTHER; note = 2'-fluorocytidine
  modified_base 5: mod_base = OTHER; note = 2'-O-methyladenosine
  modified_base 6: mod_base = OTHER; note = 2'-fluoroguanosine
  modified_base 7: mod_base = gm
  modified_base 8: mod_base = gm
  modified_base 9: mod_base = um
  modified_base 10: mod_base = cm
  modified_base 11: mod_base = um
  modified_base 12: mod_base = OTHER; note = 2'-fluorocytidine
  modified_base 13: mod_base = cm
  modified_base 14: mod_base = OTHER; note = 2'-fluorocytidine
  modified_base 15: mod_base = OTHER; note = 2'-O-methyladenosine
  modified_base 16: mod_base = OTHER; note = 2'-fluorocytidine
  modified_base 17: mod_base = um
  modified_base 18: mod_base = OTHER; note = 2'-fluorouridine
  modified_base 19: mod_base = um
  modified_base 20: mod_base = gm
  modified_base 20^21: mod_base = OTHER; note = phosphorothioate linkage
  modified_base 21: mod_base = OTHER; note = 2'-O-methyladenosine
  source 1..21: mol_type = other RNA
acacagggtctcccactttga

SEQ ID NO: 1116 - RNA, 21 nt, synthetic construct
  modified_base 1: mod_base = um
  modified_base 1^2: mod_base = OTHER; note = phosphorothioate linkage
  modified_base 2: mod_base = OTHER; note = 2'-fluoroguanosine
  modified_base 2^3: mod_base = OTHER; note = phosphorothioate linkage
  modified_base 3: mod_base = um
  modified_base 3^4: mod_base = OTHER; note = phosphorothioate linkage
  modified_base 4: mod_base = OTHER; note = 2'-fluoroadenosine
  modified_base 5: mod_base = cm
  modified_base 6: mod_base = OTHER; note = 2'-fluoroadenosine
  modified_base 7: mod_base = cm
  modified_base 8: mod_base = OTHER; note = 2'-O-methyladenosine
  modified_base 9: mod_base = gm
  modified_base 10: mod_base = gm
  modified_base 11: mod_base = gm
  modified_base 12: mod_base = OTHER; note = 2'-fluorouridine
  modified_base 13: mod_base = cm
  modified_base 14: mod_base = OTHER; note = 2'-fluorouridine
  modified_base 15: mod_base = cm
  modified_base 16: mod_base = OTHER; note = 2'-fluorocytidine
  modified_base 17: mod_base = cm
  modified_base 18: mod_base = OTHER; note = 2'-fluoroadenosine
  modified_base 19: mod_base = cm
  modified_base 20: mod_base = um
  modified_base 20^21: mod_base = OTHER; note = phosphorothioate linkage
  modified_base 21: mod_base = um
  source 1..21: mol_type = other RNA
tgtacacagggtctcccactt

SEQ ID NO: 1117 - RNA, 21 nt, synthetic construct
  modified_base 1: mod_base = OTHER; note = 2'-O-methyladenosine
  modified_base 1^2: mod_base = OTHER; note = phosphorothioate linkage
  modified_base 2: mod_base = OTHER; note = 2'-fluoroguanosine
  modified_base 2^3: mod_base = OTHER; note = phosphorothioate linkage
  modified_base 3: mod_base = gm
  modified_base 3^4: mod_base = OTHER; note = phosphorothioate linkage
  modified_base 4: mod_base = OTHER; note = 2'-fluorouridine
  modified_base 5: mod_base = OTHER; note = 2'-O-methyladenosine
  modified_base 6: mod_base = OTHER; note = 2'-fluorocytidine
  modified_base 7: mod_base = OTHER; note = 2'-O-methyladenosine
  modified_base 8: mod_base = cm
  modified_base 9: mod_base = OTHER; note = 2'-O-methyladenosine
  modified_base 10: mod_base = gm
  modified_base 11: mod_base = gm
  modified_base 12: mod_base = OTHER; note = 2'-fluoroguanosine
  modified_base 13: mod_base = um
  modified_base 14: mod_base = OTHER; note = 2'-fluorocytidine
  modified_base 15: mod_base = um
  modified_base 16: mod_base = OTHER; note = 2'-fluorocytidine
  modified_base 17: mod_base = cm
  modified_base 18: mod_base = OTHER; note = 2'-fluorocytidine
  modified_base 19: mod_base = OTHER; note = 2'-O-methyladenosine
  modified_base 20: mod_base = cm
  modified_base 20^21: mod_base = OTHER; note = phosphorothioate linkage
  modified_base 21: mod_base = um
  source 1..21: mol_type = other RNA
aggtacacagggtctcccact

SEQ ID NO: 1118 - RNA, 21 nt, synthetic construct
  modified_base 1: mod_base = um
  modified_base 1^2: mod_base = OTHER; note = phosphorothioate linkage
  modified_base 2: mod_base = OTHER; note = 2'-fluoroadenosine
  modified_base 2^3: mod_base = OTHER; note = phosphorothioate linkage
  modified_base 3: mod_base = gm
  modified_base 3^4: mod_base = OTHER; note = phosphorothioate linkage
  modified_base 4: mod_base = OTHER; note = 2'-fluoroguanosine
  modified_base 5: mod_base = um
  modified_base 6: mod_base = OTHER; note = 2'-fluoroadenosine
  modified_base 7: mod_base = cm
  modified_base 8: mod_base = OTHER; note = 2'-O-methyladenosine
  modified_base 9: mod_base = cm
  modified_base 10: mod_base = OTHER; note = 2'-O-methyladenosine
  modified_base 11: mod_base = gm
  modified_base 12: mod_base = OTHER; note = 2'-fluoroguanosine
  modified_base 13: mod_base = gm
  modified_base 14: mod_base = OTHER; note = 2'-fluorouridine
  modified_base 15: mod_base = cm
  modified_base 16: mod_base = OTHER; note = 2'-fluorouridine
  modified_base 17: mod_base = cm
  modified_base 18: mod_base = OTHER; note = 2'-fluorocytidine
  modified_base 19: mod_base = cm
  modified_base 20: mod_base = OTHER; note = 2'-O-methyladenosine
  modified_base 20^21: mod_base = OTHER; note = phosphorothioate linkage
  modified_base 21: mod_base = cm
  source 1..21: mol_type = other RNA
taggtacacagggtctcccac

SEQ ID NO: 1119 - RNA, 21 nt, synthetic construct
  modified_base 1: mod_base = um
  modified_base 1^2: mod_base = OTHER; note = phosphorothioate linkage
  modified_base 2: mod_base = OTHER; note = 2'-fluoroguanosine
  modified_base 2^3: mod_base = OTHER; note = phosphorothioate linkage
  modified_base 3: mod_base = OTHER; note = 2'-O-methyladenosine
  modified_base 3^4: mod_base = OTHER; note = phosphorothioate linkage
  modified_base 4: mod_base = OTHER; note = 2'-fluoroadenosine
  modified_base 5: mod_base = cm
  modified_base 6: mod_base = OTHER; note = 2'-fluoroadenosine
  modified_base 7: mod_base = OTHER; note = 2'-O-methyladenosine
  modified_base 8: mod_base = gm
  modified_base 9: mod_base = um
  modified_base 10: mod_base = cm
  modified_base 11: mod_base = um
  modified_base 12: mod_base = OTHER; note = 2'-fluoroguanosine
  modified_base 13: mod_base = cm
  modified_base 14: mod_base = OTHER; note = 2'-fluorouridine
  modified_base 15: mod_base = OTHER; note = 2'-O-methyladenosine
  modified_base 16: mod_base = OTHER; note = 2'-fluorouridine
  modified_base 17: mod_base = um
  modified_base 18: mod_base = OTHER; note = 2'-fluorouridine
  modified_base 19: mod_base = gm
  modified_base 20: mod_base = OTHER; note = 2'-O-methyladenosine
  modified_base 20^21: mod_base = OTHER; note = phosphorothioate linkage
  modified_base 21: mod_base = um
  source 1..21: mol_type = other RNA
tgaacaagtctgctatttgat

SEQ ID NO: 1120 - RNA, 21 nt, synthetic construct
  modified_base 1: mod_base = um
  modified_base 1^2: mod_base = OTHER; note = phosphorothioate linkage
  modified_base 2: mod_base = OTHER; note = 2'-fluoroguanosine
  modified_base 2^3: mod_base = OTHER; note = phosphorothioate linkage
  modified_base 3: mod_base = cm
  modified_base 3^4: mod_base = OTHER; note = phosphorothioate linkage
  modified_base 4: mod_base = OTHER; note = 2'-fluorouridine
  modified_base 5: mod_base = um
  modified_base 6: mod_base = OTHER; note = 2'-fluorouridine
  modified_base 7: mod_base = OTHER; note = 2'-O-methyladenosine
  modified_base 8: mod_base = OTHER; note = 2'-O-methyladenosine
  modified_base 9: mod_base = cm
  modified_base 10: mod_base = um
  modified_base 11: mod_base = um
  modified_base 12: mod_base = OTHER; note = 2'-fluorouridine
  modified_base 13: mod_base = cm
  modified_base 14: mod_base = OTHER; note = 2'-fluorouridine
  modified_base 15: mod_base = um
  modified_base 16: mod_base = OTHER; note = 2'-fluorocytidine
  modified_base 17: mod_base = um
  modified_base 18: mod_base = OTHER; note = 2'-fluorocytidine
  modified_base 19: mod_base = um
  modified_base 20: mod_base = OTHER; note = 2'-O-methyladenosine
  modified_base 20^21: mod_base = OTHER; note = phosphorothioate linkage
  modified_base 21: mod_base = gm
  source 1..21: mol_type = other RNA
tgctttaactttcttctctag

SEQ ID NO: 1121 - RNA, 21 nt, synthetic construct
  modified_base 1: mod_base = um
  modified_base 1^2: mod_base = OTHER; note = phosphorothioate linkage
  modified_base 2: mod_base = OTHER; note = 2'-fluorouridine
  modified_base 2^3: mod_base = OTHER; note = phosphorothioate linkage
  modified_base 3: mod_base = um
  modified_base 3^4: mod_base = OTHER; note = phosphorothioate linkage
  modified_base 4: mod_base = OTHER; note = 2'-fluoroguanosine
  modified_base 5: mod_base = cm
  modified_base 6: mod_base = OTHER; note = 2'-fluorouridine
  modified_base 7: mod_base = um
  modified_base 8: mod_base = um
  modified_base 9: mod_base = OTHER; note = 2'-O-methyladenosine
  modified_base 10: mod_base = OTHER; note = 2'-O-methyladenosine
  modified_base 11: mod_base = cm
  modified_base 12: mod_base = OTHER; note = 2'-fluorouridine
  modified_base 13: mod_base = um
  modified_base 14: mod_base = OTHER; note = 2'-fluorouridine
  modified_base 15: mod_base = cm
  modified_base 16: mod_base = OTHER; note = 2'-fluorouridine
  modified_base 17: mod_base = um
  modified_base 18: mod_base = OTHER; note = 2'-fluorocytidine
  modified_base 19: mod_base = um
  modified_base 20: mod_base = cm
  modified_base 20^21: mod_base = OTHER; note = phosphorothioate linkage
  modified_base 21: mod_base = um
  source 1..21: mol_type = other RNA
tttgctttaactttcttctct

SEQ ID NO: 1122 - RNA, 21 nt, synthetic construct
  modified_base 1: mod_base = um
  modified_base 1^2: mod_base = OTHER; note = phosphorothioate linkage
  modified_base 2: mod_base = OTHER; note = 2'-fluoroguanosine
  modified_base 2^3: mod_base = OTHER; note = phosphorothioate linkage
  modified_base 3: mod_base = OTHER; note = 2'-O-methyladenosine
  modified_base 3^4: mod_base = OTHER; note = phosphorothioate linkage
  modified_base 4: mod_base = OTHER; note = 2'-fluoroadenosine
  modified_base 5: mod_base = OTHER; note = 2'-O-methyladenosine
  modified_base 6: mod_base = OTHER; note = 2'-fluorouridine
  modified_base 7: mod_base = um
  modified_base 8: mod_base = OTHER; note = 2'-O-methyladenosine
  modified_base 9: mod_base = cm
  modified_base 10: mod_base = OTHER; note = 2'-O-methyladenosine
  modified_base 11: mod_base = OTHER; note = 2'-O-methyladenosine
  modified_base 12: mod_base = OTHER; note = 2'-fluorouridine
  modified_base 13: mod_base = OTHER; note = 2'-O-methyladenosine
  modified_base 14: mod_base = OTHER; note = 2'-fluorouridine
  modified_base 15: mod_base = um
  modified_base 16: mod_base = OTHER; note = 2'-fluoroguanosine
  modified_base 17: mod_base = gm
  modified_base 18: mod_base = OTHER; note = 2'-fluoroguanosine
  modified_base 19: mod_base = cm
  modified_base 20: mod_base = cm
  modified_base 20^21: mod_base = OTHER; note = phosphorothioate linkage
  modified_base 21: mod_base = um
  source 1..21: mol_type = other RNA
tgaaattacaatattgggcct

SEQ ID NO: 1123 - RNA, 21 nt, synthetic construct
  modified_base 1: mod_base = um
  modified_base 1^2: mod_base = OTHER; note = phosphorothioate linkage
  modified_base 2: mod_base = OTHER; note = 2'-fluoroadenosine
  modified_base 2^3: mod_base = OTHER; note = phosphorothioate linkage
  modified_base 3: mod_base = OTHER; note = 2'-O-methyladenosine
  modified_base 3^4: mod_base = OTHER; note = phosphorothioate linkage
  modified_base 4: mod_base = OTHER; note = 2'-fluorocytidine
  modified_base 5: mod_base = um
  modified_base 6: mod_base = OTHER; note = 2'-fluorouridine
  modified_base 7: mod_base = um
  modified_base 8: mod_base = cm
  modified_base 9: mod_base = gm
  modified_base 10: mod_base = um
  modified_base 11: mod_base = um
  modified_base 12: mod_base = OTHER; note = 2'-fluorocytidine
  modified_base 13: mod_base = um
  modified_base 14: mod_base = OTHER; note = 2'-fluoroguanosine
  modified_base 15: mod_base = OTHER; note = 2'-O-methyladenosine
  modified_base 16: mod_base = OTHER; note = 2'-fluoroadenosine
  modified_base 17: mod_base = gm
  modified_base 18: mod_base = OTHER; note = 2'-fluoroguanosine
  modified_base 19: mod_base = gm
  modified_base 20: mod_base = um
  modified_base 20^21: mod_base = OTHER; note = phosphorothioate linkage
  modified_base 21: mod_base = cm
  source 1..21: mol_type = other RNA
taactttcgttctgaagggtc

SEQ ID NO: 1124 - RNA, 21 nt, synthetic construct
  modified_base 1: mod_base = um
  modified_base 1^2: mod_base = OTHER; note = phosphorothioate linkage
  modified_base 2: mod_base = OTHER; note = 2'-fluorocytidine
  modified_base 2^3: mod_base = OTHER; note = phosphorothioate linkage
  modified_base 3: mod_base = OTHER; note = 2'-O-methyladenosine
  modified_base 3^4: mod_base = OTHER; note = phosphorothioate linkage
  modified_base 4: mod_base = OTHER; note = 2'-fluorouridine
  modified_base 5: mod_base = OTHER; note = 2'-O-methyladenosine
  modified_base 6: mod_base = OTHER; note = 2'-fluorouridine
  modified_base 7: mod_base = OTHER; note = 2'-O-methyladenosine
  modified_base 8: mod_base = OTHER; note = 2'-O-methyladenosine
  modified_base 9: mod_base = cm
  modified_base 10: mod_base = um
  modified_base 11: mod_base = um
  modified_base 12: mod_base = OTHER; note = 2'-fluorouridine
  modified_base 13: mod_base = cm
  modified_base 14: mod_base = OTHER; note = 2'-fluoroguanosine
  modified_base 15: mod_base = um
  modified_base 16: mod_base = OTHER; note = 2'-fluorouridine
  modified_base 17: mod_base = cm
  modified_base 18: mod_base = OTHER; note = 2'-fluorouridine
  modified_base 19: mod_base = gm
  modified_base 20: mod_base = OTHER; note = 2'-O-methyladenosine
  modified_base 20^21: mod_base = OTHER; note = phosphorothioate linkage
  modified_base 21: mod_base = OTHER; note = 2'-O-methyladenosine
  source 1..21: mol_type = other RNA
tcatataactttcgttctgaa

SEQ ID NO: 1125 - RNA, 21 nt, synthetic construct
  modified_base 1: mod_base = um
  modified_base 1^2: mod_base = OTHER; note = phosphorothioate linkage
  modified_base 2: mod_base = OTHER; note = 2'-fluorouridine
  modified_base 2^3: mod_base = OTHER; note = phosphorothioate linkage
  modified_base 3: mod_base = cm
  modified_base 3^4: mod_base = OTHER; note = phosphorothioate linkage
  modified_base 4: mod_base = OTHER; note = 2'-fluorocytidine
  modified_base 5: mod_base = OTHER; note = 2'-O-methyladenosine
  modified_base 6: mod_base = OTHER; note = 2'-fluorouridine
  modified_base 7: mod_base = OTHER; note = 2'-O-methyladenosine
  modified_base 8: mod_base = OTHER; note = 2'-O-methyladenosine
  modified_base 9: mod_base = um
  modified_base 10: mod_base = cm
  modified_base 11: mod_base = OTHER; note = 2'-O-methyladenosine
  modified_base 12: mod_base = OTHER; note = 2'-fluoroguanosine
  modified_base 13: mod_base = um
  modified_base 14: mod_base = OTHER; note = 2'-fluorouridine
  modified_base 15: mod_base = OTHER; note = 2'-O-methyladenosine
  modified_base 16: mod_base = OTHER; note = 2'-fluoroadenosine
  modified_base 17: mod_base = OTHER; note = 2'-O-methyladenosine
  modified_base 18: mod_base = OTHER; note = 2'-fluorocytidine
  modified_base 19: mod_base = gm
  modified_base 20: mod_base = gm
  modified_base 20^21: mod_base = OTHER; note = phosphorothioate linkage
  modified_base 21: mod_base = gm
  source 1..21: mol_type = other RNA
ttccataatcagttaaacggg

SEQ ID NO: 1126 - RNA, 21 nt, synthetic construct
  modified_base 1: mod_base = um
  modified_base 1^2: mod_base = OTHER; note = phosphorothioate linkage
  modified_base 2: mod_base = OTHER; note = 2'-fluorouridine
  modified_base 2^3: mod_base = OTHER; note = phosphorothioate linkage
  modified_base 3: mod_base = OTHER; note = 2'-O-methyladenosine
  modified_base 3^4: mod_base = OTHER; note = phosphorothioate linkage
  modified_base 4: mod_base = OTHER; note = 2'-fluoroguanosine
  modified_base 5: mod_base = gm
  modified_base 6: mod_base = OTHER; note = 2'-fluoroadenosine
  modified_base 7: mod_base = OTHER; note = 2'-O-methyladenosine
  modified_base 8: mod_base = OTHER; note = 2'-O-methyladenosine
  modified_base 9: mod_base = um
  modified_base 10: mod_base = cm
  modified_base 11: mod_base = cm
  modified_base 12: mod_base = OTHER; note = 2'-fluoroadenosine
  modified_base 13: mod_base = OTHER; note = 2'-O-methyladenosine
  modified_base 14: mod_base = OTHER; note = 2'-fluorouridine
  modified_base 15: mod_base = gm
  modified_base 16: mod_base = OTHER; note = 2'-fluorocytidine
  modified_base 17: mod_base = um
  modified_base 18: mod_base = OTHER; note = 2'-fluoroguanosine
  modified_base 19: mod_base = um
  modified_base 20: mod_base = cm
  modified_base 20^21: mod_base = OTHER; note = phosphorothioate linkage
  modified_base 21: mod_base = um
  source 1..21: mol_type = other RNA
ttaggaaatccaatgctgtct

SEQ ID NO: 1127 - RNA, 21 nt, synthetic construct
  modified_base 1: mod_base = um
  modified_base 1^2: mod_base = OTHER; note = phosphorothioate linkage
  modified_base 2: mod_base = OTHER; note = 2'-fluoroadenosine
  modified_base 2^3: mod_base = OTHER; note = phosphorothioate linkage
  modified_base 3: mod_base = OTHER; note = 2'-O-methyladenosine
  modified_base 3^4: mod_base = OTHER; note = phosphorothioate linkage
  modified_base 4: mod_base = OTHER; note = 2'-fluoroadenosine
  modified_base 5: mod_base = gm
  modified_base 6: mod_base = OTHER; note = 2'-fluoroguanosine
  modified_base 7: mod_base = OTHER; note = 2'-O-methyladenosine
  modified_base 8: mod_base = cm
  modified_base 9: mod_base = OTHER; note = 2'-O-methyladenosine
  modified_base 10: mod_base = OTHER; note = 2'-O-methyladenosine
  modified_base 11: mod_base = OTHER; note = 2'-O-methyladenosine
  modified_base 12: mod_base = OTHER; note = 2'-fluoroadenosine
  modified_base 13: mod_base = um
  modified_base 14: mod_base = OTHER; note = 2'-fluoroguanosine
  modified_base 15: mod_base = gm
  modified_base 16: mod_base = OTHER; note = 2'-fluorocytidine
  modified_base 17: mod_base = OTHER; note = 2'-O-methyladenosine
  modified_base 18: mod_base = OTHER; note = 2'-fluoroadenosine
  modified_base 19: mod_base = um
  modified_base 20: mod_base = OTHER; note = 2'-O-methyladenosine
  modified_base 20^21: mod_base = OTHER; note = phosphorothioate linkage
  modified_base 21: mod_base = OTHER; note = 2'-O-methyladenosine
  source 1..21: mol_type = other RNA
taaaggacaaaatggcaataa

SEQ ID NO: 1128 - RNA, 21 nt, synthetic construct
  modified_base 1: mod_base = um
  modified_base 1^2: mod_base = OTHER; note = phosphorothioate linkage
  modified_base 2: mod_base = OTHER; note = 2'-fluoroadenosine
  modified_base 2^3: mod_base = OTHER; note = phosphorothioate linkage
  modified_base 3: mod_base = OTHER; note = 2'-O-methyladenosine
  modified_base 3^4: mod_base = OTHER; note = phosphorothioate linkage
  modified_base 4: mod_base = OTHER; note = 2'-fluorouridine
  modified_base 5: mod_base = cm
  modified_base 6: mod_base = OTHER; note = 2'-fluoroadenosine
  modified_base 7: mod_base = OTHER; note = 2'-O-methyladenosine
  modified_base 8: mod_base = OTHER; note = 2'-O-methyladenosine
  modified_base 9: mod_base = gm
  modified_base 10: mod_base = gm
  modified_base 11: mod_base = OTHER; note = 2'-O-methyladenosine
  modified_base 12: mod_base = OTHER; note = 2'-fluorocytidine
  modified_base 13: mod_base = OTHER; note = 2'-O-methyladenosine
  modified_base 14: mod_base = OTHER; note = 2'-fluoroadenosine
  modified_base 15: mod_base = OTHER; note = 2'-O-methyladenosine
  modified_base 16: mod_base = OTHER; note = 2'-fluoroadenosine
  modified_base 17: mod_base = um
  modified_base 18: mod_base = OTHER; note = 2'-fluoroguanosine
  modified_base 19: mod_base = gm
  modified_base 20: mod_base = cm
  modified_base 20^21: mod_base = OTHER; note = phosphorothioate linkage
  modified_base 21: mod_base = OTHER; note = 2'-O-methyladenosine
  source 1..21: mol_type = other RNA
taatcaaaggacaaaatggca

SEQ ID NO: 1129 - RNA, 21 nt, synthetic construct
  modified_base 1: mod_base = um
  modified_base 1^2: mod_base = OTHER; note = phosphorothioate linkage
  modified_base 2: mod_base = OTHER; note = 2'-fluorouridine
  modified_base 2^3: mod_base = OTHER; note = phosphorothioate linkage
  modified_base 3: mod_base = gm
  modified_base 3^4: mod_base = OTHER; note = phosphorothioate linkage
  modified_base 4: mod_base = OTHER; note = 2'-O-methyladenosine
  modified_base 5: mod_base = um
  modified_base 6: mod_base = OTHER; note = 2'-fluorocytidine
  modified_base 7: mod_base = OTHER; note = 2'-O-methyladenosine
  modified_base 8: mod_base = cm
  modified_base 9: mod_base = OTHER; note = 2'-O-methyladenosine
  modified_base 10: mod_base = OTHER; note = 2'-O-methyladenosine
  modified_base 11: mod_base = gm
  modified_base 12: mod_base = OTHER; note = 2'-fluorocytidine
  modified_base 13: mod_base = cm
  modified_base 14: mod_base = OTHER; note = 2'-fluoroadenosine
  modified_base 15: mod_base = OTHER; note = 2'-O-methyladenosine
  modified_base 16: mod_base = OTHER; note = 2'-fluoroadenosine
  modified_base 17: mod_base = OTHER; note = 2'-O-methyladenosine
  modified_base 18: mod_base = cm
  modified_base 19: mod_base = cm
  modified_base 20: mod_base = um
  modified_base 20^21: mod_base = OTHER; note = phosphorothioate linkage
  modified_base 21: mod_base = gm
  source 1..21: mol_type = other RNA
ttgatcacaagccaaaacctg

SEQ ID NO: 1130 - RNA, 21 nt, synthetic construct
  modified_base 1: mod_base = OTHER; note = 5'-cyclopropyl phosphonate-2'-O-methyluridine
  modified_base 1^2: mod_base = OTHER; note = phosphorothioate linkage
  modified_base 2: mod_base = OTHER; note = 2'-fluorouridine
  modified_base 2^3: mod_base = OTHER; note = phosphorothioate linkage
  modified_base 3: mod_base = gm
  modified_base 3^4: mod_base = OTHER; note = phosphorothioate linkage
  modified_base 4: mod_base = OTHER; note = 2'-O-methyladenosine
  modified_base 5: mod_base = um
  modified_base 6: mod_base = OTHER; note = 2'-fluorocytidine
  modified_base 7: mod_base = OTHER; note = 2'-O-methyladenosine
  modified_base 8: mod_base = cm
  modified_base 9: mod_base = OTHER; note = 2'-O-methyladenosine
  modified_base 10: mod_base = OTHER; note = 2'-O-methyladenosine
  modified_base 11: mod_base = gm
  modified_base 12: mod_base = OTHER; note = 2'-fluorocytidine
  modified_base 13: mod_base = cm
  modified_base 14: mod_base = OTHER; note = 2'-fluoroadenosine
  modified_base 15: mod_base = OTHER; note = 2'-O-methyladenosine
  modified_base 16: mod_base = OTHER; note = 2'-fluoroadenosine
  modified_base 17: mod_base = OTHER; note = 2'-O-methyladenosine
  modified_base 18: mod_base = cm
  modified_base 19: mod_base = cm
  modified_base 20: mod_base = um
  modified_base 20^21: mod_base = OTHER; note = phosphorothioate linkage
  modified_base 21: mod_base = gm
  source 1..21: mol_type = other RNA
ttgatcacaagccaaaacctg

SEQ ID NO: 1131 - RNA, 21 nt, synthetic construct
  modified_base 1: mod_base = um
  modified_base 1^2: mod_base = OTHER; note = phosphorothioate linkage
  modified_base 2: mod_base = OTHER; note = 2'-fluorouridine
  modified_base 2^3: mod_base = OTHER; note = phosphorothioate linkage
  modified_base 3: mod_base = gm
  modified_base 3^4: mod_base = OTHER; note = phosphorothioate linkage
  modified_base 4: mod_base = OTHER; note = 2'-O-methyladenosine
  modified_base 5: mod_base = um
  modified_base 6: mod_base = cm
  modified_base 7: mod_base = OTHER; note = 2'-O-methyladenosine
  modified_base 8: mod_base = cm
  modified_base 9: mod_base = OTHER; note = 2'-O-methyladenosine
  modified_base 10: mod_base = OTHER; note = 2'-O-methyladenosine
  modified_base 11: mod_base = gm
  modified_base 12: mod_base = OTHER; note = 2'-fluorocytidine
  modified_base 13: mod_base = cm
  modified_base 14: mod_base = OTHER; note = 2'-fluoroadenosine
  modified_base 15: mod_base = OTHER; note = 2'-O-methyladenosine
  modified_base 16: mod_base = OTHER; note = 2'-fluoroadenosine
  modified_base 17: mod_base = OTHER; note = 2'-O-methyladenosine
  modified_base 18: mod_base = cm
  modified_base 19: mod_base = cm
  modified_base 20: mod_base = um
  modified_base 20^21: mod_base = OTHER; note = phosphorothioate linkage
  modified_base 21: mod_base = gm
  source 1..21: mol_type = other RNA
ttgatcacaagccaaaacctg

SEQ ID NO: 1132 - RNA, 21 nt, synthetic construct
  modified_base 1: mod_base = OTHER; note = 5'-cyclopropyl phosphonate-2'-O-methyluridine
  modified_base 1^2: mod_base = OTHER; note = phosphorothioate linkage
  modified_base 2: mod_base = OTHER; note = 2'-fluorouridine
  modified_base 2^3: mod_base = OTHER; note = phosphorothioate linkage
  modified_base 3: mod_base = gm
  modified_base 3^4: mod_base = OTHER; note = phosphorothioate linkage
  modified_base 4: mod_base = OTHER; note = 2'-O-methyladenosine
  modified_base 5: mod_base = um
  modified_base 6: mod_base = cm
  modified_base 7: mod_base = OTHER; note = 2'-O-methyladenosine
  modified_base 8: mod_base = cm
  modified_base 9: mod_base = OTHER; note = 2'-O-methyladenosine
  modified_base 10: mod_base = OTHER; note = 2'-O-methyladenosine
  modified_base 11: mod_base = gm
  modified_base 12: mod_base = OTHER; note = 2'-fluorocytidine
  modified_base 13: mod_base = cm
  modified_base 14: mod_base = OTHER; note = 2'-fluoroadenosine
  modified_base 15: mod_base = OTHER; note = 2'-O-methyladenosine
  modified_base 16: mod_base = OTHER; note = 2'-fluoroadenosine
  modified_base 17: mod_base = OTHER; note = 2'-O-methyladenosine
  modified_base 18: mod_base = cm
  modified_base 19: mod_base = cm
  modified_base 20: mod_base = um
  modified_base 20^21: mod_base = OTHER; note = phosphorothioate linkage
  modified_base 21: mod_base = gm
  source 1..21: mol_type = other RNA
ttgatcacaagccaaaacctg

SEQ ID NO: 1133 - RNA, 21 nt, synthetic construct
  modified_base 1: mod_base = um
  modified_base 1^2: mod_base = OTHER; note = phosphorothioate linkage
  modified_base 2: mod_base = OTHER; note = 2'-fluorocytidine
  modified_base 2^3: mod_base = OTHER; note = phosphorothioate linkage
  modified_base 3: mod_base = cm
  modified_base 3^4: mod_base = OTHER; note = phosphorothioate linkage
  modified_base 4: mod_base = um
  modified_base 5: mod_base = um
  modified_base 6: mod_base = OTHER; note = 2'-fluorouridine
  modified_base 7: mod_base = OTHER; note = 2'-O-methyladenosine
  modified_base 8: mod_base = OTHER; note = 2'-O-methyladenosine
  modified_base 9: mod_base = OTHER; note = 2'-O-methyladenosine
  modified_base 10: mod_base = gm
  modified_base 11: mod_base = gm
  modified_base 12: mod_base = OTHER; note = 2'-fluorouridine
  modified_base 13: mod_base = um
  modified_base 14: mod_base = OTHER; note = 2'-fluorouridine
  modified_base 15: mod_base = um
  modified_base 16: mod_base = OTHER; note = 2'-fluorocytidine
  modified_base 17: mod_base = OTHER; note = 2'-O-methyladenosine
  modified_base 18: mod_base = gm
  modified_base 19: mod_base = um
  modified_base 20: mod_base = OTHER; note = 2'-O-methyladenosine
  modified_base 20^21: mod_base = OTHER; note = phosphorothioate linkage
  modified_base 21: mod_base = gm
  source 1..21: mol_type = other RNA
tcctttaaaggttttcagtag

SEQ ID NO: 1134 - RNA, 21 nt, synthetic construct
  modified_base 1: mod_base = OTHER; note = 5'-cyclopropyl phosphonate-2'-O-methyluridine
  modified_base 1^2: mod_base = OTHER; note = phosphorothioate linkage
  modified_base 2: mod_base = OTHER; note = 2'-fluorocytidine
  modified_base 2^3: mod_base = OTHER; note = phosphorothioate linkage
  modified_base 3: mod_base = cm
  modified_base 3^4: mod_base = OTHER; note = phosphorothioate linkage
  modified_base 4: mod_base = um
  modified_base 5: mod_base = um
  modified_base 6: mod_base = OTHER; note = 2'-fluorouridine
  modified_base 7: mod_base = OTHER; note = 2'-O-methyladenosine
  modified_base 8: mod_base = OTHER; note = 2'-O-methyladenosine
  modified_base 9: mod_base = OTHER; note = 2'-O-methyladenosine
  modified_base 10: mod_base = gm
  modified_base 11: mod_base = gm
  modified_base 12: mod_base = OTHER; note = 2'-fluorouridine
  modified_base 13: mod_base = um
  modified_base 14: mod_base = OTHER; note = 2'-fluorouridine
  modified_base 15: mod_base = um
  modified_base 16: mod_base = OTHER; note = 2'-fluorocytidine
  modified_base 17: mod_base = OTHER; note = 2'-O-methyladenosine
  modified_base 18: mod_base = gm
  modified_base 19: mod_base = um
  modified_base 20: mod_base = OTHER; note = 2'-O-methyladenosine
  modified_base 20^21: mod_base = OTHER; note = phosphorothioate linkage
  modified_base 21: mod_base = gm
  source 1..21: mol_type = other RNA
tcctttaaaggttttcagtag

SEQ ID NO: 1135 - RNA, 21 nt, synthetic construct
  modified_base 1: mod_base = um
  modified_base 1^2: mod_base = OTHER; note = phosphorothioate linkage
  modified_base 2: mod_base = OTHER; note = 2'-fluorocytidine
  modified_base 2^3: mod_base = OTHER; note = phosphorothioate linkage
  modified_base 3: mod_base = cm
  modified_base 3^4: mod_base = OTHER; note = phosphorothioate linkage
  modified_base 4: mod_base = um
  modified_base 5: mod_base = um
  modified_base 6: mod_base = um
  modified_base 7: mod_base = OTHER; note = 2'-O-methyladenosine
  modified_base 8: mod_base = OTHER; note = 2'-O-methyladenosine
  modified_base 9: mod_base = OTHER; note = 2'-O-methyladenosine
  modified_base 10: mod_base = gm
  modified_base 11: mod_base = gm
  modified_base 12: mod_base = OTHER; note = 2'-fluorouridine
  modified_base 13: mod_base = um
  modified_base 14: mod_base = OTHER; note = 2'-fluorouridine
  modified_base 15: mod_base = um
  modified_base 16: mod_base = OTHER; note = 2'-fluorocytidine
  modified_base 17: mod_base = OTHER; note = 2'-O-methyladenosine
  modified_base 18: mod_base = gm
  modified_base 19: mod_base = um
  modified_base 20: mod_base = OTHER; note = 2'-O-methyladenosine
  modified_base 20^21: mod_base = OTHER; note = phosphorothioate linkage
  modified_base 21: mod_base = gm
  source 1..21: mol_type = other RNA
tcctttaaaggttttcagtag

SEQ ID NO: 1136 - RNA, 21 nt, synthetic construct
  modified_base 1: mod_base = OTHER; note = 5'-cyclopropyl phosphonate-2'-O-methyluridine
  modified_base 1^2: mod_base = OTHER; note = phosphorothioate linkage
  modified_base 2: mod_base = OTHER; note = 2'-fluorocytidine
  modified_base 2^3: mod_base = OTHER; note = phosphorothioate linkage
  modified_base 3: mod_base = cm
  modified_base 3^4: mod_base = OTHER; note = phosphorothioate linkage
  modified_base 4: mod_base = um
  modified_base 5: mod_base = um
  modified_base 6: mod_base = um
  modified_base 7: mod_base = OTHER; note = 2'-O-methyladenosine
  modified_base 8: mod_base = OTHER; note = 2'-O-methyladenosine
  modified_base 9: mod_base = OTHER; note = 2'-O-methyladenosine
  modified_base 10: mod_base = gm
  modified_base 11: mod_base = gm
  modified_base 12: mod_base = OTHER; note = 2'-fluorouridine
  modified_base 13: mod_base = um
  modified_base 14: mod_base = OTHER; note = 2'-fluorouridine
  modified_base 15: mod_base = um
  modified_base 16: mod_base = OTHER; note = 2'-fluorocytidine
  modified_base 17: mod_base = OTHER; note = 2'-O-methyladenosine
  modified_base 18: mod_base = gm
  modified_base 19: mod_base = um
  modified_base 20: mod_base = OTHER; note = 2'-O-methyladenosine
  modified_base 20^21: mod_base = OTHER; note = phosphorothioate linkage
  modified_base 21: mod_base = gm
  source 1..21: mol_type = other RNA
tcctttaaaggttttcagtag

SEQ ID NO: 1137 - RNA, 21 nt, synthetic construct
  modified_base 1: mod_base = um
  modified_base 1^2: mod_base = OTHER; note = phosphorothioate linkage
  modified_base 2: mod_base = OTHER; note = 2'-fluorocytidine
  modified_base 2^3: mod_base = OTHER; note = phosphorothioate linkage
  modified_base 3: mod_base = cm
  modified_base 3^4: mod_base = OTHER; note = phosphorothioate linkage
  modified_base 4: mod_base = um
  modified_base 5: mod_base = um
  modified_base 6: mod_base = um
  modified_base 7: mod_base = OTHER; note = 2'-O-methyladenosine
  modified_base 8: mod_base = OTHER; note = 2'-O-methyladenosine
  modified_base 9: mod_base = OTHER; note = 2'-O-methyladenosine
  modified_base 10: mod_base = gm
  modified_base 11: mod_base = gm
  modified_base 12: mod_base = OTHER; note = 2'-fluorouridine
  modified_base 13: mod_base = um
  modified_base 14: mod_base = OTHER; note = 2'-fluorouridine
  modified_base 15: mod_base = um
  modified_base 16: mod_base = OTHER; note = 2'-fluorocytidine
  modified_base 17: mod_base = OTHER; note = 2'-O-methyladenosine
  modified_base 18: mod_base = gm
  modified_base 19: mod_base = um
  modified_base 20: mod_base = gm
  modified_base 20^21: mod_base = OTHER; note = phosphorothioate linkage
  modified_base 21: mod_base = gm
  source 1..21: mol_type = other RNA
tcctttaaaggttttcagtgg

SEQ ID NO: 1138 - RNA, 21 nt, synthetic construct
  modified_base 1: mod_base = OTHER; note = 5'-cyclopropyl phosphonate-2'-O-methyluridine
  modified_base 1^2: mod_base = OTHER; note = phosphorothioate linkage
  modified_base 2: mod_base = OTHER; note = 2'-fluorocytidine
  modified_base 2^3: mod_base = OTHER; note = phosphorothioate linkage
  modified_base 3: mod_base = cm
  modified_base 3^4: mod_base = OTHER; note = phosphorothioate linkage
  modified_base 4: mod_base = um
  modified_base 5: mod_base = um
  modified_base 6: mod_base = um
  modified_base 7: mod_base = OTHER; note = 2'-O-methyladenosine
  modified_base 8: mod_base = OTHER; note = 2'-O-methyladenosine
  modified_base 9: mod_base = OTHER; note = 2'-O-methyladenosine
  modified_base 10: mod_base = gm
  modified_base 11: mod_base = gm
  modified_base 12: mod_base = OTHER; note = 2'-fluorouridine
  modified_base 13: mod_base = um
  modified_base 14: mod_base = OTHER; note = 2'-fluorouridine
  modified_base 15: mod_base = um
  modified_base 16: mod_base = OTHER; note = 2'-fluorocytidine
  modified_base 17: mod_base = OTHER; note = 2'-O-methyladenosine
  modified_base 18: mod_base = gm
  modified_base 19: mod_base = um
  modified_base 20: mod_base = gm
  modified_base 20^21: mod_base = OTHER; note = phosphorothioate linkage
  modified_base 21: mod_base = gm
  source 1..21: mol_type = other RNA
tcctttaaaggttttcagtgg

SEQ ID NO: 1139 - RNA, 21 nt, synthetic construct
  modified_base 1: mod_base = OTHER; note = 2'-O-methyladenosine
  modified_base 1^2: mod_base = OTHER; note = phosphorothioate linkage
  modified_base 2: mod_base = OTHER; note = 2'-fluoroguanosine
  modified_base 2^3: mod_base = OTHER; note = phosphorothioate linkage
  modified_base 3: mod_base = OTHER; note = 2'-O-methyladenosine
  modified_base 3^4: mod_base = OTHER; note = phosphorothioate linkage
  modified_base 4: mod_base = OTHER; note = 2'-O-methyladenosine
  modified_base 5: mod_base = OTHER; note = 2'-O-methyladenosine
  modified_base 6: mod_base = OTHER; note = 2'-fluoroguanosine
  modified_base 7: mod_base = OTHER; note = 2'-O-methyladenosine
  modified_base 8: mod_base = OTHER; note = 2'-O-methyladenosine
  modified_base 9: mod_base = cm
  modified_base 10: mod_base = um
  modified_base 11: mod_base = OTHER; note = 2'-O-methyladenosine
  modified_base 12: mod_base = OTHER; note = 2'-fluorouridine
  modified_base 13: mod_base = um
  modified_base 14: mod_base = OTHER; note = 2'-fluorocytidine
  modified_base 15: mod_base = cm
  modified_base 16: mod_base = OTHER; note = 2'-fluoroadenosine
  modified_base 17: mod_base = um
  modified_base 18: mod_base = OTHER; note = 2'-O-methyladenosine
  modified_base 19: mod_base = OTHER; note = 2'-O-methyladenosine
  modified_base 20: mod_base = um
  modified_base 20^21: mod_base = OTHER; note = phosphorothioate linkage
  modified_base 21: mod_base = cm
  source 1..21: mol_type = other RNA
agaaagaactattccataatc

SEQ ID NO: 1140 - RNA, 21 nt, synthetic construct
  modified_base 1: mod_base = OTHER; note = 5'-cyclopropyl phosphonate-2'-O-methyladenosine
  modified_base 1^2: mod_base = OTHER; note = phosphorothioate linkage
  modified_base 2: mod_base = OTHER; note = 2'-fluoroguanosine
  modified_base 2^3: mod_base = OTHER; note = phosphorothioate linkage
  modified_base 3: mod_base = OTHER; note = 2'-O-methyladenosine
  modified_base 3^4: mod_base = OTHER; note = phosphorothioate linkage
  modified_base 4: mod_base = OTHER; note = 2'-O-methyladenosine
  modified_base 5: mod_base = OTHER; note = 2'-O-methyladenosine
  modified_base 6: mod_base = OTHER; note = 2'-fluoroguanosine
  modified_base 7: mod_base = OTHER; note = 2'-O-methyladenosine
  modified_base 8: mod_base = OTHER; note = 2'-O-methyladenosine
  modified_base 9: mod_base = cm
  modified_base 10: mod_base = um
  modified_base 11: mod_base = OTHER; note = 2'-O-methyladenosine
  modified_base 12: mod_base = OTHER; note = 2'-fluorouridine
  modified_base 13: mod_base = um
  modified_base 14: mod_base = OTHER; note = 2'-fluorocytidine
  modified_base 15: mod_base = cm
  modified_base 16: mod_base = OTHER; note = 2'-fluoroadenosine
  modified_base 17: mod_base = um
  modified_base 18: mod_base = OTHER; note = 2'-O-methyladenosine
  modified_base 19: mod_base = OTHER; note = 2'-O-methyladenosine
  modified_base 20: mod_base = um
  modified_base 20^21: mod_base = OTHER; note = phosphorothioate linkage
  modified_base 21: mod_base = cm
  source 1..21: mol_type = other RNA
agaaagaactattccataatc

SEQ ID NO: 1141 - RNA, 21 nt, synthetic construct
  modified_base 1: mod_base = um
  modified_base 1^2: mod_base = OTHER; note = phosphorothioate linkage
  modified_base 2: mod_base = OTHER; note = 2'-fluoroguanosine
  modified_base 2^3: mod_base = OTHER; note = phosphorothioate linkage
  modified_base 3: mod_base = OTHER; note = 2'-O-methyladenosine
  modified_base 3^4: mod_base = OTHER; note = phosphorothioate linkage
  modified_base 4: mod_base = OTHER; note = 2'-O-methyladenosine
  modified_base 5: mod_base = OTHER; note = 2'-O-methyladenosine
  modified_base 6: mod_base = OTHER; note = 2'-fluoroguanosine
  modified_base 7: mod_base = OTHER; note = 2'-O-methyladenosine
  modified_base 8: mod_base = OTHER; note = 2'-O-methyladenosine
  modified_base 9: mod_base = cm
  modified_base 10: mod_base = um
  modified_base 11: mod_base = OTHER; note = 2'-O-methyladenosine
  modified_base 12: mod_base = OTHER; note = 2'-fluorouridine
  modified_base 13: mod_base = um
  modified_base 14: mod_base = OTHER; note = 2'-fluorocytidine
  modified_base 15: mod_base = cm
  modified_base 16: mod_base = OTHER; note = 2'-fluoroadenosine
  modified_base 17: mod_base = um
  modified_base 18: mod_base = OTHER; note = 2'-O-methyladenosine
  modified_base 19: mod_base = OTHER; note = 2'-O-methyladenosine
  modified_base 20: mod_base = um
  modified_base 20^21: mod_base = OTHER; note = phosphorothioate linkage
  modified_base 21: mod_base = cm
  source 1..21: mol_type = other RNA
tgaaagaactattccataatc

SEQ ID NO: 1142 - RNA, 21 nt, synthetic construct
  modified_base 1: mod_base = OTHER; note = 5'-cyclopropyl phosphonate-2'-O-methyluridine
  modified_base 1^2: mod_base = OTHER; note = phosphorothioate linkage
  modified_base 2: mod_base = OTHER; note = 2'-fluoroguanosine
  modified_base 2^3: mod_base = OTHER; note = phosphorothioate linkage
  modified_base 3: mod_base = OTHER; note = 2'-O-methyladenosine
  modified_base 3^4: mod_base = OTHER; note = phosphorothioate linkage
  modified_base 4: mod_base = OTHER; note = 2'-O-methyladenosine
  modified_base 5: mod_base = OTHER; note = 2'-O-methyladenosine
  modified_base 6: mod_base = OTHER; note = 2'-fluoroguanosine
  modified_base 7: mod_base = OTHER; note = 2'-O-methyladenosine
  modified_base 8: mod_base = OTHER; note = 2'-O-methyladenosine
  modified_base 9: mod_base = cm
  modified_base 10: mod_base = um
  modified_base 11: mod_base = OTHER; note = 2'-O-methyladenosine
  modified_base 12: mod_base = OTHER; note = 2'-fluorouridine
  modified_base 13: mod_base = um
  modified_base 14: mod_base = OTHER; note = 2'-fluorocytidine
  modified_base 15: mod_base = cm
  modified_base 16: mod_base = OTHER; note = 2'-fluoroadenosine
  modified_base 17: mod_base = um
  modified_base 18: mod_base = OTHER; note = 2'-O-methyladenosine
  modified_base 19: mod_base = OTHER; note = 2'-O-methyladenosine
  modified_base 20: mod_base = um
  modified_base 20^21: mod_base = OTHER; note = phosphorothioate linkage
  modified_base 21: mod_base = cm
  source 1..21: mol_type = other RNA
tgaaagaactattccataatc

SEQ ID NO: 1143 - RNA, 21 nt, synthetic construct
  modified_base 1: mod_base = OTHER; note = 5'-cyclopropyl phosphonate-2'-O-methyluridine
  modified_base 1^2: mod_base = OTHER; note = phosphorothioate linkage
  modified_base 2: mod_base = OTHER; note = 2'-fluoroguanosine
  modified_base 3: mod_base = OTHER; note = 2'-O-methyladenosine
  modified_base 4: mod_base = OTHER; note = 2'-O-methyladenosine
  modified_base 5: mod_base = OTHER; note = 2'-O-methyladenosine
  modified_base 6: mod_base = OTHER; note = 2'-fluoroguanosine
  modified_base 7: mod_base = OTHER; note = 2'-O-methyladenosine
  modified_base 8: mod_base = OTHER; note = 2'-O-methyladenosine
  modified_base 9: mod_base = cm
  modified_base 10: mod_base = um
  modified_base 11: mod_base = OTHER; note = 2'-O-methyladenosine
  modified_base 12: mod_base = OTHER; note = 2'-fluorouridine
  modified_base 13: mod_base = um
  modified_base 14: mod_base = OTHER; note = 2'-fluorocytidine
  modified_base 15: mod_base = cm
  modified_base 16: mod_base = OTHER; note = 2'-fluoroadenosine
  modified_base 17: mod_base = um
  modified_base 18: mod_base = OTHER; note = 2'-O-methyladenosine
  modified_base 19: mod_base = OTHER; note = 2'-O-methyladenosine
  modified_base 20: mod_base = um
  modified_base 20^21: mod_base = OTHER; note = phosphorothioate linkage
  modified_base 21: mod_base = cm
  source 1..21: mol_type = other RNA
tgaaagaactattccataatc

SEQ ID NO: 1144 - RNA, 21 nt, synthetic construct
  modified_base 1: mod_base = OTHER; note = 2'-O-methyladenosine
  modified_base 1^2: mod_base = OTHER; note = phosphorothioate linkage
  modified_base 2: mod_base = OTHER; note = 2'-fluoroguanosine
  modified_base 2^3: mod_base = OTHER; note = phosphorothioate linkage
  modified_base 3: mod_base = um
  modified_base 3^4: mod_base = OTHER; note = phosphorothioate linkage
  modified_base 4: mod_base = gm
  modified_base 5: mod_base = um
  modified_base 6: mod_base = OTHER; note = 2'-fluorouridine
  modified_base 7: mod_base = gm
  modified_base 8: mod_base = um
  modified_base 9: mod_base = cm
  modified_base 10: mod_base = OTHER; note = 2'-O-methyladenosine
  modified_base 11: mod_base = um
  modified_base 12: mod_base = OTHER; note = 2'-fluorouridine
  modified_base 13: mod_base = um
  modified_base 14: mod_base = OTHER; note = 2'-fluorouridine
  modified_base 15: mod_base = um
  modified_base 16: mod_base = OTHER; note = 2'-fluoroguanosine
  modified_base 17: mod_base = OTHER; note = 2'-O-methyladenosine
  modified_base 18: mod_base = gm
  modified_base 19: mod_base = OTHER; note = 2'-O-methyladenosine
  modified_base 20: mod_base = OTHER; note = 2'-O-methyladenosine
  modified_base 20^21: mod_base = OTHER; note = phosphorothioate linkage
  modified_base 21: mod_base = cm
  source 1..21: mol_type = other RNA
agtgttgtcatttttgagaac

SEQ ID NO: 1145 - RNA, 21 nt, synthetic construct
  modified_base 1: mod_base = OTHER; note = 5'-cyclopropyl phosphonate-2'-O-methyladenosine
  modified_base 1^2: mod_base = OTHER; note = phosphorothioate linkage
  modified_base 2: mod_base = OTHER; note = 2'-fluoroguanosine
  modified_base 2^3: mod_base = OTHER; note = phosphorothioate linkage
  modified_base 3: mod_base = um
  modified_base 3^4: mod_base = OTHER; note = phosphorothioate linkage
  modified_base 4: mod_base = gm
  modified_base 5: mod_base = um
  modified_base 6: mod_base = OTHER; note = 2'-fluorouridine
  modified_base 7: mod_base = gm
  modified_base 8: mod_base = um
  modified_base 9: mod_base = cm
  modified_base 10: mod_base = OTHER; note = 2'-O-methyladenosine
  modified_base 11: mod_base = um
  modified_base 12: mod_base = OTHER; note = 2'-fluorouridine
  modified_base 13: mod_base = um
  modified_base 14: mod_base = OTHER; note = 2'-fluorouridine
  modified_base 15: mod_base = um
  modified_base 16: mod_base = OTHER; note = 2'-fluoroguanosine
  modified_base 17: mod_base = OTHER; note = 2'-O-methyladenosine
  modified_base 18: mod_base = gm
  modified_base 19: mod_base = OTHER; note = 2'-O-methyladenosine
  modified_base 20: mod_base = OTHER; note = 2'-O-methyladenosine
  modified_base 20^21: mod_base = OTHER; note = phosphorothioate linkage
  modified_base 21: mod_base = cm
  source 1..21: mol_type = other RNA
agtgttgtcatttttgagaac

SEQ ID NO: 1146 - RNA, 21 nt, synthetic construct
  modified_base 1: mod_base = um
  modified_base 1^2: mod_base = OTHER; note = phosphorothioate linkage
  modified_base 2: mod_base = OTHER; note = 2'-fluoroguanosine
  modified_base 2^3: mod_base = OTHER; note = phosphorothioate linkage
  modified_base 3: mod_base = um
  modified_base 3^4: mod_base = OTHER; note = phosphorothioate linkage
  modified_base 4: mod_base = gm
  modified_base 5: mod_base = um
  modified_base 6: mod_base = OTHER; note = 2'-fluorouridine
  modified_base 7: mod_base = gm
  modified_base 8: mod_base = um
  modified_base 9: mod_base = cm
  modified_base 10: mod_base = OTHER; note = 2'-O-methyladenosine
  modified_base 11: mod_base = um
  modified_base 12: mod_base = OTHER; note = 2'-fluorouridine
  modified_base 13: mod_base = um
  modified_base 14: mod_base = OTHER; note = 2'-fluorouridine
  modified_base 15: mod_base = um
  modified_base 16: mod_base = OTHER; note = 2'-fluoroguanosine
  modified_base 17: mod_base = OTHER; note = 2'-O-methyladenosine
  modified_base 18: mod_base = gm
  modified_base 19: mod_base = OTHER; note = 2'-O-methyladenosine
  modified_base 20: mod_base = OTHER; note = 2'-O-methyladenosine
  modified_base 20^21: mod_base = OTHER; note = phosphorothioate linkage
  modified_base 21: mod_base = cm
  source 1..21: mol_type = other RNA
tgtgttgtcatttttgagaac

SEQ ID NO: 1147 - RNA, 21 nt, synthetic construct
  modified_base 1: mod_base = OTHER; note = 5'-cyclopropyl phosphonate-2'-O-methyluridine
  modified_base 1^2: mod_base = OTHER; note = phosphorothioate linkage
  modified_base 2: mod_base = OTHER; note = 2'-fluoroguanosine
  modified_base 2^3: mod_base = OTHER; note = phosphorothioate linkage
  modified_base 3: mod_base = um
  modified_base 3^4: mod_base = OTHER; note = phosphorothioate linkage
  modified_base 4: mod_base = gm
  modified_base 5: mod_base = um
  modified_base 6: mod_base = OTHER; note = 2'-fluorouridine
  modified_base 7: mod_base = gm
  modified_base 8: mod_base = um
  modified_base 9: mod_base = cm
  modified_base 10: mod_base = OTHER; note = 2'-O-methyladenosine
  modified_base 11: mod_base = um
  modified_base 12: mod_base = OTHER; note = 2'-fluorouridine
  modified_base 13: mod_base = um
  modified_base 14: mod_base = OTHER; note = 2'-fluorouridine
  modified_base 15: mod_base = um
  modified_base 16: mod_base = OTHER; note = 2'-fluoroguanosine
  modified_base 17: mod_base = OTHER; note = 2'-O-methyladenosine
  modified_base 18: mod_base = gm
  modified_base 19: mod_base = OTHER; note = 2'-O-methyladenosine
  modified_base 20: mod_base = OTHER; note = 2'-O-methyladenosine
  modified_base 20^21: mod_base = OTHER; note = phosphorothioate linkage
  modified_base 21: mod_base = cm
  source 1..21: mol_type = other RNA
tgtgttgtcatttttgagaac

SEQ ID NO: 1148 - RNA, 21 nt, synthetic construct
  modified_base 1: mod_base = OTHER; note = 5'-cyclopropyl phosphonate-2'-O-methyluridine
  modified_base 1^2: mod_base = OTHER; note = phosphorothioate linkage
  modified_base 2: mod_base = OTHER; note = 2'-fluoroguanosine
  modified_base 2^3: mod_base = OTHER; note = phosphorothioate linkage
  modified_base 3: mod_base = um
  modified_base 3^4: mod_base = OTHER; note = phosphorothioate linkage
  modified_base 4: mod_base = gm
  modified_base 5: mod_base = um
  modified_base 6: mod_base = OTHER; note = 2',3'-seco-uridine
  modified_base 7: mod_base = gm
  modified_base 8: mod_base = um
  modified_base 9: mod_base = cm
  modified_base 10: mod_base = OTHER; note = 2'-O-methyladenosine
  modified_base 11: mod_base = um
  modified_base 12: mod_base = OTHER; note = 2'-fluorouridine
  modified_base 13: mod_base = um
  modified_base 14: mod_base = OTHER; note = 2'-fluorouridine
  modified_base 15: mod_base = um
  modified_base 16: mod_base = OTHER; note = 2'-fluoroguanosine
  modified_base 17: mod_base = OTHER; note = 2'-O-methyladenosine
  modified_base 18: mod_base = gm
  modified_base 19: mod_base = OTHER; note = 2'-O-methyladenosine
  modified_base 20: mod_base = OTHER; note = 2'-O-methyladenosine
  modified_base 20^21: mod_base = OTHER; note = phosphorothioate linkage
  modified_base 21: mod_base = cm
  source 1..21: mol_type = other RNA
tgtgttgtcatttttgagaac

SEQ ID NO: 1149 - RNA, 21 nt, synthetic construct
  modified_base 1: mod_base = OTHER; note = 5'-cyclopropyl phosphonate-2'-O-methyluridine
  modified_base 1^2: mod_base = OTHER; note = phosphorothioate linkage
  modified_base 2: mod_base = OTHER; note = 2'-fluoroguanosine
  modified_base 3: mod_base = um
  modified_base 4: mod_base = gm
  modified_base 5: mod_base = um
  modified_base 6: mod_base = OTHER; note = 2'-fluorouridine
  modified_base 7: mod_base = gm
  modified_base 8: mod_base = um
  modified_base 9: mod_base = cm
  modified_base 10: mod_base = OTHER; note = 2'-O-methyladenosine
  modified_base 11: mod_base = um
  modified_base 12: mod_base = OTHER; note = 2'-fluorouridine
  modified_base 13: mod_base = um
  modified_base 14: mod_base = OTHER; note = 2'-fluorouridine
  modified_base 15: mod_base = um
  modified_base 16: mod_base = OTHER; note = 2'-fluoroguanosine
  modified_base 17: mod_base = OTHER; note = 2'-O-methyladenosine
  modified_base 18: mod_base = gm
  modified_base 19: mod_base = OTHER; note = 2'-O-methyladenosine
  modified_base 20: mod_base = OTHER; note = 2'-O-methyladenosine
  modified_base 20^21: mod_base = OTHER; note = phosphorothioate linkage
  modified_base 21: mod_base = cm
  source 1..21: mol_type = other RNA
tgtgttgtcatttttgagaac

SEQ ID NO: 1150 - RNA, 21 nt, synthetic construct
  modified_base 1: mod_base = um
  modified_base 1^2: mod_base = OTHER; note = phosphorothioate linkage
  modified_base 2: mod_base = OTHER; note = 2'-fluoroguanosine
  modified_base 2^3: mod_base = OTHER; note = phosphorothioate linkage
  modified_base 3: mod_base = um
  modified_base 3^4: mod_base = OTHER; note = phosphorothioate linkage
  modified_base 4: mod_base = gm
  modified_base 5: mod_base = um
  modified_base 6: mod_base = um
  modified_base 7: mod_base = gm
  modified_base 8: mod_base = um
  modified_base 9: mod_base = cm
  modified_base 10: mod_base = OTHER; note = 2'-O-methyladenosine
  modified_base 11: mod_base = um
  modified_base 12: mod_base = OTHER; note = 2'-fluorouridine
  modified_base 13: mod_base = um
  modified_base 14: mod_base = OTHER; note = 2'-fluorouridine
  modified_base 15: mod_base = um
  modified_base 16: mod_base = OTHER; note = 2'-fluoroguanosine
  modified_base 17: mod_base = OTHER; note = 2'-O-methyladenosine
  modified_base 18: mod_base = gm
  modified_base 19: mod_base = OTHER; note = 2'-O-methyladenosine
  modified_base 20: mod_base = OTHER; note = 2'-O-methyladenosine
  modified_base 20^21: mod_base = OTHER; note = phosphorothioate linkage
  modified_base 21: mod_base = cm
  source 1..21: mol_type = other RNA
tgtgttgtcatttttgagaac

SEQ ID NO: 1151 - RNA, 21 nt, synthetic construct
  modified_base 1: mod_base = OTHER; note = 5'-cyclopropyl phosphonate-2'-O-methyluridine
  modified_base 1^2: mod_base = OTHER; note = phosphorothioate linkage
  modified_base 2: mod_base = OTHER; note = 2'-fluoroguanosine
  modified_base 2^3: mod_base = OTHER; note = phosphorothioate linkage
  modified_base 3: mod_base = um
  modified_base 3^4: mod_base = OTHER; note = phosphorothioate linkage
  modified_base 4: mod_base = gm
  modified_base 5: mod_base = um
  modified_base 6: mod_base = um
  modified_base 7: mod_base = gm
  modified_base 8: mod_base = um
  modified_base 9: mod_base = cm
  modified_base 10: mod_base = OTHER; note = 2'-O-methyladenosine
  modified_base 11: mod_base = um
  modified_base 12: mod_base = OTHER; note = 2'-fluorouridine
  modified_base 13: mod_base = um
  modified_base 14: mod_base = OTHER; note = 2'-fluorouridine
  modified_base 15: mod_base = um
  modified_base 16: mod_base = OTHER; note = 2'-fluoroguanosine
  modified_base 17: mod_base = OTHER; note = 2'-O-methyladenosine
  modified_base 18: mod_base = gm
  modified_base 19: mod_base = OTHER; note = 2'-O-methyladenosine
  modified_base 20: mod_base = OTHER; note = 2'-O-methyladenosine
  modified_base 20^21: mod_base = OTHER; note = phosphorothioate linkage
  modified_base 21: mod_base = cm
  source 1..21: mol_type = other RNA
tgtgttgtcatttttgagaac

SEQ ID NO: 1152 - RNA, 21 nt, synthetic construct
  modified_base 1: mod_base = OTHER; note = 5'-cyclopropyl phosphonate-2'-O-methyluridine
  modified_base 1^2: mod_base = OTHER; note = phosphorothioate linkage
  modified_base 2: mod_base = OTHER; note = 2'-fluoroguanosine
  modified_base 3: mod_base = um
  modified_base 4: mod_base = gm
  modified_base 5: mod_base = um
  modified_base 6: mod_base = um
  modified_base 7: mod_base = gm
  modified_base 8: mod_base = um
  modified_base 9: mod_base = cm
  modified_base 10: mod_base = OTHER; note = 2'-O-methyladenosine
  modified_base 11: mod_base = um
  modified_base 12: mod_base = OTHER; note = 2'-fluorouridine
  modified_base 13: mod_base = um
  modified_base 14: mod_base = OTHER; note = 2'-fluorouridine
  modified_base 15: mod_base = um
  modified_base 16: mod_base = OTHER; note = 2'-fluoroguanosine
  modified_base 17: mod_base = OTHER; note = 2'-O-methyladenosine
  modified_base 18: mod_base = gm
  modified_base 19: mod_base = OTHER; note = 2'-O-methyladenosine
  modified_base 20: mod_base = OTHER; note = 2'-O-methyladenosine
  modified_base 20^21: mod_base = OTHER; note = phosphorothioate linkage
  modified_base 21: mod_base = cm
  source 1..21: mol_type = other RNA
tgtgttgtcatttttgagaac

SEQ ID NO: 1153 - RNA, 21 nt, synthetic construct
  modified_base 1: mod_base = um
  modified_base 1^2: mod_base = OTHER; note = phosphorothioate linkage
  modified_base 2: mod_base = OTHER; note = 2'-fluorocytidine
  modified_base 2^3: mod_base = OTHER; note = phosphorothioate linkage
  modified_base 3: mod_base = OTHER; note = 2'-O-methyladenosine
  modified_base 3^4: mod_base = OTHER; note = phosphorothioate linkage
  modified_base 4: mod_base = gm
  modified_base 5: mod_base = OTHER; note = 2'-O-methyladenosine
  modified_base 6: mod_base = OTHER; note = 2'-fluoroadenosine
  modified_base 7: mod_base = um
  modified_base 8: mod_base = cm
  modified_base 9: mod_base = cm
  modified_base 10: mod_base = um
  modified_base 11: mod_base = gm
  modified_base 12: mod_base = OTHER; note = 2'-fluorouridine
  modified_base 13: mod_base = cm
  modified_base 14: mod_base = OTHER; note = 2'-fluorouridine
  modified_base 15: mod_base = um
  modified_base 16: mod_base = OTHER; note = 2'-fluoroguanosine
  modified_base 17: mod_base = um
  modified_base 18: mod_base = cm
  modified_base 19: mod_base = OTHER; note = 2'-O-methyladenosine
  modified_base 20: mod_base = um
  modified_base 20^21: mod_base = OTHER; note = phosphorothioate linkage
  modified_base 21: mod_base = um
  source 1..21: mol_type = other RNA
tcagaatcctgtcttgtcatt

SEQ ID NO: 1154 - RNA, 21 nt, synthetic construct
  modified_base 1: mod_base = OTHER; note = 5'-cyclopropyl phosphonate-2'-O-methyluridine
  modified_base 1^2: mod_base = OTHER; note = phosphorothioate linkage
  modified_base 2: mod_base = OTHER; note = 2'-fluorocytidine
  modified_base 2^3: mod_base = OTHER; note = phosphorothioate linkage
  modified_base 3: mod_base = OTHER; note = 2'-O-methyladenosine
  modified_base 3^4: mod_base = OTHER; note = phosphorothioate linkage
  modified_base 4: mod_base = gm
  modified_base 5: mod_base = OTHER; note = 2'-O-methyladenosine
  modified_base 6: mod_base = OTHER; note = 2'-fluoroadenosine
  modified_base 7: mod_base = um
  modified_base 8: mod_base = cm
  modified_base 9: mod_base = cm
  modified_base 10: mod_base = um
  modified_base 11: mod_base = gm
  modified_base 12: mod_base = OTHER; note = 2'-fluorouridine
  modified_base 13: mod_base = cm
  modified_base 14: mod_base = OTHER; note = 2'-fluorouridine
  modified_base 15: mod_base = um
  modified_base 16: mod_base = OTHER; note = 2'-fluoroguanosine
  modified_base 17: mod_base = um
  modified_base 18: mod_base = cm
  modified_base 19: mod_base = OTHER; note = 2'-O-methyladenosine
  modified_base 20: mod_base = um
  modified_base 20^21: mod_base = OTHER; note = phosphorothioate linkage
  modified_base 21: mod_base = um
  source 1..21: mol_type = other RNA
tcagaatcctgtcttgtcatt

SEQ ID NO: 1155 - RNA, 21 nt, synthetic construct
  modified_base 1: mod_base = um
  modified_base 1^2: mod_base = OTHER; note = phosphorothioate linkage
  modified_base 2: mod_base = OTHER; note = 2'-fluorocytidine
  modified_base 2^3: mod_base = OTHER; note = phosphorothioate linkage
  modified_base 3: mod_base = OTHER; note = 2'-O-methyladenosine
  modified_base 3^4: mod_base = OTHER; note = phosphorothioate linkage
  modified_base 4: mod_base = gm
  modified_base 5: mod_base = OTHER; note = 2'-O-methyladenosine
  modified_base 6: mod_base = OTHER; note = 2'-O-methyladenosine
  modified_base 7: mod_base = um
  modified_base 8: mod_base = cm
  modified_base 9: mod_base = cm
  modified_base 10: mod_base = um
  modified_base 11: mod_base = gm
  modified_base 12: mod_base = OTHER; note = 2'-fluorouridine
  modified_base 13: mod_base = cm
  modified_base 14: mod_base = OTHER; note = 2'-fluorouridine
  modified_base 15: mod_base = um
  modified_base 16: mod_base = OTHER; note = 2'-fluoroguanosine
  modified_base 17: mod_base = um
  modified_base 18: mod_base = cm
  modified_base 19: mod_base = OTHER; note = 2'-O-methyladenosine
  modified_base 20: mod_base = um
  modified_base 20^21: mod_base = OTHER; note = phosphorothioate linkage
  modified_base 21: mod_base = um
  source 1..21: mol_type = other RNA
tcagaatcctgtcttgtcatt

SEQ ID NO: 1156 - RNA, 21 nt, synthetic construct
  modified_base 1: mod_base = OTHER; note = 5'-cyclopropyl phosphonate-2'-O-methyluridine
  modified_base 1^2: mod_base = OTHER; note = phosphorothioate linkage
  modified_base 2: mod_base = OTHER; note = 2'-fluorocytidine
  modified_base 2^3: mod_base = OTHER; note = phosphorothioate linkage
  modified_base 3: mod_base = OTHER; note = 2'-O-methyladenosine
  modified_base 3^4: mod_base = OTHER; note = phosphorothioate linkage
  modified_base 4: mod_base = gm
  modified_base 5: mod_base = OTHER; note = 2'-O-methyladenosine
  modified_base 6: mod_base = OTHER; note = 2'-O-methyladenosine
  modified_base 7: mod_base = um
  modified_base 8: mod_base = cm
  modified_base 9: mod_base = cm
  modified_base 10: mod_base = um
  modified_base 11: mod_base = gm
  modified_base 12: mod_base = OTHER; note = 2'-fluorouridine
  modified_base 13: mod_base = cm
  modified_base 14: mod_base = OTHER; note = 2'-fluorouridine
  modified_base 15: mod_base = um
  modified_base 16: mod_base = OTHER; note = 2'-fluoroguanosine
  modified_base 17: mod_base = um
  modified_base 18: mod_base = cm
  modified_base 19: mod_base = OTHER; note = 2'-O-methyladenosine
  modified_base 20: mod_base = um
  modified_base 20^21: mod_base = OTHER; note = phosphorothioate linkage
  modified_base 21: mod_base = um
  source 1..21: mol_type = other RNA
tcagaatcctgtcttgtcatt

SEQ ID NO: 1157 - RNA, 21 nt, synthetic construct
  modified_base 1: mod_base = OTHER; note = 5'-cyclopropyl phosphonate-2'-O-methyluridine
  modified_base 1^2: mod_base = OTHER; note = phosphorothioate linkage
  modified_base 2: mod_base = OTHER; note = 2'-fluorocytidine
  modified_base 3: mod_base = OTHER; note = 2'-O-methyladenosine
  modified_base 4: mod_base = gm
  modified_base 5: mod_base = OTHER; note = 2'-O-methyladenosine
  modified_base 6: mod_base = OTHER; note = 2'-O-methyladenosine
  modified_base 7: mod_base = um
  modified_base 8: mod_base = cm
  modified_base 9: mod_base = cm
  modified_base 10: mod_base = um
  modified_base 11: mod_base = gm
  modified_base 12: mod_base = OTHER; note = 2'-fluorouridine
  modified_base 13: mod_base = cm
  modified_base 14: mod_base = OTHER; note = 2'-fluorouridine
  modified_base 15: mod_base = um
  modified_base 16: mod_base = OTHER; note = 2'-fluoroguanosine
  modified_base 17: mod_base = um
  modified_base 18: mod_base = cm
  modified_base 19: mod_base = OTHER; note = 2'-O-methyladenosine
  modified_base 20: mod_base = um
  modified_base 20^21: mod_base = OTHER; note = phosphorothioate linkage
  modified_base 21: mod_base = um
  source 1..21: mol_type = other RNA
tcagaatcctgtcttgtcatt

SEQ ID NO: 1158 - RNA, 21 nt, synthetic construct
  modified_base 1: mod_base = um
  modified_base 1^2: mod_base = OTHER; note = phosphorothioate linkage
  modified_base 2: mod_base = OTHER; note = 2'-fluoroadenosine
  modified_base 2^3: mod_base = OTHER; note = phosphorothioate linkage
  modified_base 3: mod_base = OTHER; note = 2'-O-methyladenosine
  modified_base 3^4: mod_base = OTHER; note = phosphorothioate linkage
  modified_base 4: mod_base = gm
  modified_base 5: mod_base = um
  modified_base 6: mod_base = um
  modified_base 7: mod_base = um
  modified_base 8: mod_base = OTHER; note = 2'-O-methyladenosine
  modified_base 9: mod_base = gm
  modified_base 10: mod_base = um
  modified_base 11: mod_base = cm
  modified_base 12: mod_base = OTHER; note = 2'-fluoroadenosine
  modified_base 13: mod_base = OTHER; note = 2'-O-methyladenosine
  modified_base 14: mod_base = OTHER; note = 2'-fluorocytidine
  modified_base 15: mod_base = um
  modified_base 16: mod_base = OTHER; note = 2'-fluorouridine
  modified_base 17: mod_base = cm
  modified_base 18: mod_base = cm
  modified_base 19: mod_base = cm
  modified_base 20: mod_base = OTHER; note = 2'-O-methyladenosine
  modified_base 20^21: mod_base = OTHER; note = phosphorothioate linkage
  modified_base 21: mod_base = OTHER; note = 2'-O-methyladenosine
  source 1..21: mol_type = other RNA
taagtttagtcaacttcccaa

SEQ ID NO: 1159 - RNA, 21 nt, synthetic construct
  modified_base 1: mod_base = OTHER; note = 5'-cyclopropyl phosphonate-2'-O-methyluridine
  modified_base 1^2: mod_base = OTHER; note = phosphorothioate linkage
  modified_base 2: mod_base = OTHER; note = 2'-fluoroadenosine
  modified_base 2^3: mod_base = OTHER; note = phosphorothioate linkage
  modified_base 3: mod_base = OTHER; note = 2'-O-methyladenosine
  modified_base 3^4: mod_base = OTHER; note = phosphorothioate linkage
  modified_base 4: mod_base = gm
  modified_base 5: mod_base = um
  modified_base 6: mod_base = um
  modified_base 7: mod_base = um
  modified_base 8: mod_base = OTHER; note = 2'-O-methyladenosine
  modified_base 9: mod_base = gm
  modified_base 10: mod_base = um
  modified_base 11: mod_base = cm
  modified_base 12: mod_base = OTHER; note = 2'-fluoroadenosine
  modified_base 13: mod_base = OTHER; note = 2'-O-methyladenosine
  modified_base 14: mod_base = OTHER; note = 2'-fluorocytidine
  modified_base 15: mod_base = um
  modified_base 16: mod_base = OTHER; note = 2'-fluorouridine
  modified_base 17: mod_base = cm
  modified_base 18: mod_base = cm
  modified_base 19: mod_base = cm
  modified_base 20: mod_base = OTHER; note = 2'-O-methyladenosine
  modified_base 20^21: mod_base = OTHER; note = phosphorothioate linkage
  modified_base 21: mod_base = OTHER; note = 2'-O-methyladenosine
  source 1..21: mol_type = other RNA
taagtttagtcaacttcccaa

SEQ ID NO: 1160 - RNA, 21 nt, synthetic construct
  modified_base 1: mod_base = um
  modified_base 1^2: mod_base = OTHER; note = phosphorothioate linkage
  modified_base 2: mod_base = OTHER; note = 2'-fluorouridine
  modified_base 2^3: mod_base = OTHER; note = phosphorothioate linkage
  modified_base 3: mod_base = um
  modified_base 3^4: mod_base = OTHER; note = phosphorothioate linkage
  modified_base 4: mod_base = OTHER; note = 2'-fluoroguanosine
  modified_base 5: mod_base = OTHER; note = 2'-O-methyladenosine
  modified_base 6: mod_base = OTHER; note = 2'-fluorouridine
  modified_base 7: mod_base = cm
  modified_base 8: mod_base = OTHER; note = 2'-O-methyladenosine
  modified_base 9: mod_base = cm
  modified_base 10: mod_base = OTHER; note = 2'-O-methyladenosine
  modified_base 11: mod_base = OTHER; note = 2'-O-methyladenosine
  modified_base 12: mod_base = OTHER; note = 2'-fluoroguanosine
  modified_base 13: mod_base = cm
  modified_base 14: mod_base = OTHER; note = 2'-fluorocytidine
  modified_base 15: mod_base = OTHER; note = 2'-O-methyladenosine
  modified_base 16: mod_base = OTHER; note = 2'-fluoroadenosine
  modified_base 17: mod_base = OTHER; note = 2'-O-methyladenosine
  modified_base 18: mod_base = OTHER; note = 2'-fluoroadenosine
  modified_base 19: mod_base = cm
  modified_base 20: mod_base = cm
  modified_base 20^21: mod_base = OTHER; note = phosphorothioate linkage
  modified_base 21: mod_base = um
  source 1..21: mol_type = other RNA
tttgatcacaagccaaaacct

SEQ ID NO: 1161 - RNA, 21 nt, synthetic construct
  modified_base 1: mod_base = um
  modified_base 1^2: mod_base = OTHER; note = phosphorothioate linkage
  modified_base 2: mod_base = OTHER; note = 2'-fluoroguanosine
  modified_base 2^3: mod_base = OTHER; note = phosphorothioate linkage
  modified_base 3: mod_base = um
  modified_base 3^4: mod_base = OTHER; note = phosphorothioate linkage
  modified_base 4: mod_base = OTHER; note = 2'-fluorouridine
  modified_base 5: mod_base = gm
  modified_base 6: mod_base = OTHER; note = 2'-fluoroadenosine
  modified_base 7: mod_base = um
  modified_base 8: mod_base = cm
  modified_base 9: mod_base = OTHER; note = 2'-O-methyladenosine
  modified_base 10: mod_base = cm
  modified_base 11: mod_base = OTHER; note = 2'-O-methyladenosine
  modified_base 12: mod_base = OTHER; note = 2'-fluoroadenosine
  modified_base 13: mod_base = gm
  modified_base 14: mod_base = OTHER; note = 2'-fluorocytidine
  modified_base 15: mod_base = cm
  modified_base 16: mod_base = OTHER; note = 2'-fluoroadenosine
  modified_base 17: mod_base = OTHER; note = 2'-O-methyladenosine
  modified_base 18: mod_base = OTHER; note = 2'-fluoroadenosine
  modified_base 19: mod_base = OTHER; note = 2'-O-methyladenosine
  modified_base 20: mod_base = cm
  modified_base 20^21: mod_base = OTHER; note = phosphorothioate linkage
  modified_base 21: mod_base = cm
  source 1..21: mol_type = other RNA
tgttgatcacaagccaaaacc

SEQ ID NO: 1162 - RNA, 21 nt, synthetic construct
  modified_base 1: mod_base = OTHER; note = 2'-O-methyladenosine
  modified_base 1^2: mod_base = OTHER; note = phosphorothioate linkage
  modified_base 2: mod_base = OTHER; note = 2'-fluoroguanosine
  modified_base 2^3: mod_base = OTHER; note = phosphorothioate linkage
  modified_base 3: mod_base = OTHER; note = 2'-O-methyladenosine
  modified_base 3^4: mod_base = OTHER; note = phosphorothioate linkage
  modified_base 4: mod_base = OTHER; note = 2'-O-methyladenosine
  modified_base 5: mod_base = OTHER; note = 2'-fluoroadenosine
  modified_base 6: mod_base = gm
  modified_base 7: mod_base = OTHER; note = 2'-O-methyladenosine
  modified_base 8: mod_base = OTHER; note = 2'-O-methyladenosine
  modified_base 9: mod_base = cm
  modified_base 10: mod_base = um
  modified_base 11: mod_base = OTHER; note = 2'-O-methyladenosine
  modified_base 12: mod_base = OTHER; note = 2'-fluorouridine
  modified_base 13: mod_base = um
  modified_base 14: mod_base = OTHER; note = 2'-fluorocytidine
  modified_base 15: mod_base = cm
  modified_base 16: mod_base = OTHER; note = 2'-fluoroadenosine
  modified_base 17: mod_base = um
  modified_base 18: mod_base = OTHER; note = 2'-O-methyladenosine
  modified_base 19: mod_base = OTHER; note = 2'-O-methyladenosine
  modified_base 20: mod_base = um
  modified_base 20^21: mod_base = OTHER; note = phosphorothioate linkage
  modified_base 21: mod_base = cm
  source 1..21: mol_type = other RNA
agaaagaactattccataatc

SEQ ID NO: 1163 - RNA, 21 nt, synthetic construct
  modified_base 1: mod_base = OTHER; note = 2'-O-methyladenosine
  modified_base 1^2: mod_base = OTHER; note = phosphorothioate linkage
  modified_base 2: mod_base = OTHER; note = 2'-fluoroguanosine
  modified_base 2^3: mod_base = OTHER; note = phosphorothioate linkage
  modified_base 3: mod_base = OTHER; note = 2'-O-methyladenosine
  modified_base 3^4: mod_base = OTHER; note = phosphorothioate linkage
  modified_base 4: mod_base = OTHER; note = 2'-O-methyladenosine
  modified_base 5: mod_base = OTHER; note = 2'-O-methyladenosine
  modified_base 6: mod_base = gm
  modified_base 7: mod_base = OTHER; note = 2'-fluoroadenosine
  modified_base 8: mod_base = OTHER; note = 2'-O-methyladenosine
  modified_base 9: mod_base = cm
  modified_base 10: mod_base = um
  modified_base 11: mod_base = OTHER; note = 2'-O-methyladenosine
  modified_base 12: mod_base = OTHER; note = 2'-fluorouridine
  modified_base 13: mod_base = um
  modified_base 14: mod_base = OTHER; note = 2'-fluorocytidine
  modified_base 15: mod_base = cm
  modified_base 16: mod_base = OTHER; note = 2'-fluoroadenosine
  modified_base 17: mod_base = um
  modified_base 18: mod_base = OTHER; note = 2'-O-methyladenosine
  modified_base 19: mod_base = OTHER; note = 2'-O-methyladenosine
  modified_base 20: mod_base = um
  modified_base 20^21: mod_base = OTHER; note = phosphorothioate linkage
  modified_base 21: mod_base = cm
  source 1..21: mol_type = other RNA
agaaagaactattccataatc

SEQ ID NO: 1164 - RNA, 21 nt, synthetic construct
  modified_base 1: mod_base = um
  modified_base 1^2: mod_base = OTHER; note = phosphorothioate linkage
  modified_base 2: mod_base = OTHER; note = 2'-fluoroadenosine
  modified_base 2^3: mod_base = OTHER; note = phosphorothioate linkage
  modified_base 3: mod_base = gm
  modified_base 3^4: mod_base = OTHER; note = phosphorothioate linkage
  modified_base 4: mod_base = OTHER; note = 2'-O-methyladenosine
  modified_base 5: mod_base = OTHER; note = 2'-O-methyladenosine
  modified_base 6: mod_base = OTHER; note = 2'-fluoroadenosine
  modified_base 7: mod_base = gm
  modified_base 8: mod_base = OTHER; note = 2'-O-methyladenosine
  modified_base 9: mod_base = OTHER; note = 2'-O-methyladenosine
  modified_base 10: mod_base = cm
  modified_base 11: mod_base = um
  modified_base 12: mod_base = OTHER; note = 2'-fluoroadenosine
  modified_base 13: mod_base = um
  modified_base 14: mod_base = OTHER; note = 2'-fluorouridine
  modified_base 15: mod_base = cm
  modified_base 16: mod_base = OTHER; note = 2'-fluorocytidine
  modified_base 17: mod_base = OTHER; note = 2'-O-methyladenosine
  modified_base 18: mod_base = um
  modified_base 19: mod_base = OTHER; note = 2'-O-methyladenosine
  modified_base 20: mod_base = OTHER; note = 2'-O-methyladenosine
  modified_base 20^21: mod_base = OTHER; note = phosphorothioate linkage
  modified_base 21: mod_base = um
  source 1..21: mol_type = other RNA
tagaaagaactattccataat

SEQ ID NO: 1165 - RNA, 21 nt, synthetic construct
  modified_base 1: mod_base = um
  modified_base 1^2: mod_base = OTHER; note = phosphorothioate linkage
  modified_base 2: mod_base = OTHER; note = 2'-fluoroadenosine
  modified_base 2^3: mod_base = OTHER; note = phosphorothioate linkage
  modified_base 3: mod_base = gm
  modified_base 3^4: mod_base = OTHER; note = phosphorothioate linkage
  modified_base 4: mod_base = OTHER; note = 2'-O-methyladenosine
  modified_base 5: mod_base = OTHER; note = 2'-O-methyladenosine
  modified_base 6: mod_base = OTHER; note = 2'-fluoroadenosine
  modified_base 7: mod_base = gm
  modified_base 8: mod_base = OTHER; note = 2'-O-methyladenosine
  modified_base 9: mod_base = OTHER; note = 2'-O-methyladenosine
  modified_base 10: mod_base = cm
  modified_base 11: mod_base = um
  modified_base 12: mod_base = OTHER; note = 2'-fluoroadenosine
  modified_base 13: mod_base = um
  modified_base 14: mod_base = OTHER; note = 2'-fluorouridine
  modified_base 15: mod_base = cm
  modified_base 16: mod_base = OTHER; note = 2'-fluorocytidine
  modified_base 17: mod_base = OTHER; note = 2'-O-methyladenosine
  modified_base 18: mod_base = um
  modified_base 19: mod_base = OTHER; note = 2'-O-methyladenosine
  modified_base 20: mod_base = gm
  modified_base 20^21: mod_base = OTHER; note = phosphorothioate linkage
  modified_base 21: mod_base = um
  source 1..21: mol_type = other RNA
tagaaagaactattccatagt

SEQ ID NO: 1166 - RNA, 21 nt, synthetic construct
  modified_base 1: mod_base = um
  modified_base 1^2: mod_base = OTHER; note = phosphorothioate linkage
  modified_base 2: mod_base = OTHER; note = 2'-fluoroadenosine
  modified_base 2^3: mod_base = OTHER; note = phosphorothioate linkage
  modified_base 3: mod_base = gm
  modified_base 3^4: mod_base = OTHER; note = phosphorothioate linkage
  modified_base 4: mod_base = OTHER; note = 2'-O-methyladenosine
  modified_base 5: mod_base = OTHER; note = 2'-O-methyladenosine
  modified_base 6: mod_base = OTHER; note = 2'-fluoroadenosine
  modified_base 7: mod_base = gm
  modified_base 8: mod_base = OTHER; note = 2'-O-methyladenosine
  modified_base 9: mod_base = OTHER; note = 2'-O-methyladenosine
  modified_base 10: mod_base = cm
  modified_base 11: mod_base = um
  modified_base 12: mod_base = OTHER; note = 2'-fluoroadenosine
  modified_base 13: mod_base = um
  modified_base 14: mod_base = OTHER; note = 2'-fluorouridine
  modified_base 15: mod_base = cm
  modified_base 16: mod_base = OTHER; note = 2'-fluorocytidine
  modified_base 17: mod_base = OTHER; note = 2'-O-methyladenosine
  modified_base 18: mod_base = um
  modified_base 19: mod_base = OTHER; note = 2'-O-methyladenosine
  modified_base 20: mod_base = gm
  modified_base 20^21: mod_base = OTHER; note = phosphorothioate linkage
  modified_base 21: mod_base = cm
  source 1..21: mol_type = other RNA
tagaaagaactattccatagc

SEQ ID NO: 1167 - RNA, 21 nt, synthetic construct
  modified_base 1: mod_base = OTHER; note = 2'-O-methyladenosine
  modified_base 1^2: mod_base = OTHER; note = phosphorothioate linkage
  modified_base 2: mod_base = OTHER; note = 2'-fluoroguanosine
  modified_base 2^3: mod_base = OTHER; note = phosphorothioate linkage
  modified_base 3: mod_base = um
  modified_base 3^4: mod_base = OTHER; note = phosphorothioate linkage
  modified_base 4: mod_base = OTHER; note = 2'-fluoroadenosine
  modified_base 5: mod_base = OTHER; note = 2'-O-methyladenosine
  modified_base 6: mod_base = OTHER; note = 2'-fluoroguanosine
  modified_base 7: mod_base = OTHER; note = 2'-O-methyladenosine
  modified_base 8: mod_base = um
  modified_base 9: mod_base = cm
  modified_base 10: mod_base = um
  modified_base 11: mod_base = gm
  modified_base 12: mod_base = OTHER; note = 2'-fluoroadenosine
  modified_base 13: mod_base = OTHER; note = 2'-O-methyladenosine
  modified_base 14: mod_base = OTHER; note = 2'-fluoroadenosine
  modified_base 15: mod_base = cm
  modified_base 16: mod_base = OTHER; note = 2'-fluorouridine
  modified_base 17: mod_base = OTHER; note = 2'-O-methyladenosine
  modified_base 18: mod_base = OTHER; note = 2'-fluoroguanosine
  modified_base 19: mod_base = um
  modified_base 20: mod_base = cm
  modified_base 20^21: mod_base = OTHER; note = phosphorothioate linkage
  modified_base 21: mod_base = OTHER; note = 2'-O-methyladenosine
  source 1..21: mol_type = other RNA
agtaagatctgaaactagtca

SEQ ID NO: 1168 - RNA, 21 nt, synthetic construct
  modified_base 1: mod_base = OTHER; note = 2'-O-methyladenosine
  modified_base 1^2: mod_base = OTHER; note = phosphorothioate linkage
  modified_base 2: mod_base = OTHER; note = 2'-fluoroguanosine
  modified_base 2^3: mod_base = OTHER; note = phosphorothioate linkage
  modified_base 3: mod_base = um
  modified_base 3^4: mod_base = OTHER; note = phosphorothioate linkage
  modified_base 4: mod_base = OTHER; note = 2'-fluorouridine
  modified_base 5: mod_base = OTHER; note = 2'-O-methyladenosine
  modified_base 6: mod_base = OTHER; note = 2'-fluoroguanosine
  modified_base 7: mod_base = um
  modified_base 8: mod_base = OTHER; note = 2'-O-methyladenosine
  modified_base 9: mod_base = OTHER; note = 2'-O-methyladenosine
  modified_base 10: mod_base = gm
  modified_base 11: mod_base = OTHER; note = 2'-O-methyladenosine
  modified_base 12: mod_base = OTHER; note = 2'-fluorouridine
  modified_base 13: mod_base = cm
  modified_base 14: mod_base = OTHER; note = 2'-fluorouridine
  modified_base 15: mod_base = gm
  modified_base 16: mod_base = OTHER; note = 2'-fluoroadenosine
  modified_base 17: mod_base = OTHER; note = 2'-O-methyladenosine
  modified_base 18: mod_base = OTHER; note = 2'-fluoroadenosine
  modified_base 19: mod_base = cm
  modified_base 20: mod_base = um
  modified_base 20^21: mod_base = OTHER; note = phosphorothioate linkage
  modified_base 21: mod_base = OTHER; note = 2'-O-methyladenosine
  source 1..21: mol_type = other RNA
agttagtaagatctgaaacta

SEQ ID NO: 1169 - RNA, 21 nt, synthetic construct
  modified_base 1: mod_base = um
  modified_base 1^2: mod_base = OTHER; note = phosphorothioate linkage
  modified_base 2: mod_base = OTHER; note = 2'-fluoroadenosine
  modified_base 2^3: mod_base = OTHER; note = phosphorothioate linkage
  modified_base 3: mod_base = OTHER; note = 2'-O-methyladenosine
  modified_base 3^4: mod_base = OTHER; note = phosphorothioate linkage
  modified_base 4: mod_base = OTHER; note = 2'-fluoroguanosine
  modified_base 5: mod_base = um
  modified_base 6: mod_base = OTHER; note = 2'-fluorouridine
  modified_base 7: mod_base = OTHER; note = 2'-O-methyladenosine
  modified_base 8: mod_base = gm
  modified_base 9: mod_base = um
  modified_base 10: mod_base = OTHER; note = 2'-O-methyladenosine
  modified_base 11: mod_base = OTHER; note = 2'-O-methyladenosine
  modified_base 12: mod_base = OTHER; note = 2'-fluoroguanosine
  modified_base 13: mod_base = OTHER; note = 2'-O-methyladenosine
  modified_base 14: mod_base = OTHER; note = 2'-fluorouridine
  modified_base 15: mod_base = cm
  modified_base 16: mod_base = OTHER; note = 2'-fluorouridine
  modified_base 17: mod_base = gm
  modified_base 18: mod_base = OTHER; note = 2'-fluoroadenosine
  modified_base 19: mod_base = OTHER; note = 2'-O-methyladenosine
  modified_base 20: mod_base = OTHER; note = 2'-O-methyladenosine
  modified_base 20^21: mod_base = OTHER; note = phosphorothioate linkage
  modified_base 21: mod_base = cm
  source 1..21: mol_type = other RNA
taagttagtaagatctgaaac

SEQ ID NO: 1170 - RNA, 21 nt, synthetic construct
  modified_base 1: mod_base = um
  modified_base 1^2: mod_base = OTHER; note = phosphorothioate linkage
  modified_base 2: mod_base = OTHER; note = 2'-fluorocytidine
  modified_base 2^3: mod_base = OTHER; note = phosphorothioate linkage
  modified_base 3: mod_base = OTHER; note = 2'-O-methyladenosine
  modified_base 3^4: mod_base = OTHER; note = phosphorothioate linkage
  modified_base 4: mod_base = OTHER; note = 2'-fluorouridine
  modified_base 5: mod_base = OTHER; note = 2'-O-methyladenosine
  modified_base 6: mod_base = OTHER; note = 2'-fluoroadenosine
  modified_base 7: mod_base = OTHER; note = 2'-O-methyladenosine
  modified_base 8: mod_base = OTHER; note = 2'-O-methyladenosine
  modified_base 9: mod_base = cm
  modified_base 10: mod_base = OTHER; note = 2'-O-methyladenosine
  modified_base 11: mod_base = OTHER; note = 2'-O-methyladenosine
  modified_base 12: mod_base = OTHER; note = 2'-fluoroguanosine
  modified_base 13: mod_base = cm
  modified_base 14: mod_base = OTHER; note = 2'-fluoroadenosine
  modified_base 15: mod_base = cm
  modified_base 16: mod_base = OTHER; note = 2'-fluoroadenosine
  modified_base 17: mod_base = um
  modified_base 18: mod_base = OTHER; note = 2'-fluoroguanosine
  modified_base 19: mod_base = cm
  modified_base 20: mod_base = OTHER; note = 2'-O-methyladenosine
  modified_base 20^21: mod_base = OTHER; note = phosphorothioate linkage
  modified_base 21: mod_base = cm
  source 1..21: mol_type = other RNA
tcataaaacaagcacatgcac

SEQ ID NO: 1171 - RNA, 21 nt, synthetic construct
  modified_base 1: mod_base = um
  modified_base 1^2: mod_base = OTHER; note = phosphorothioate linkage
  modified_base 2: mod_base = OTHER; note = 2'-fluorouridine
  modified_base 2^3: mod_base = OTHER; note = phosphorothioate linkage
  modified_base 3: mod_base = gm
  modified_base 3^4: mod_base = OTHER; note = phosphorothioate linkage
  modified_base 4: mod_base = OTHER; note = 2'-fluoroadenosine
  modified_base 5: mod_base = OTHER; note = 2'-O-methyladenosine
  modified_base 6: mod_base = OTHER; note = 2'-fluorocytidine
  modified_base 7: mod_base = OTHER; note = 2'-O-methyladenosine
  modified_base 8: mod_base = cm
  modified_base 9: mod_base = um
  modified_base 10: mod_base = um
  modified_base 11: mod_base = cm
  modified_base 12: mod_base = OTHER; note = 2'-fluoroguanosine
  modified_base 13: mod_base = cm
  modified_base 14: mod_base = OTHER; note = 2'-fluorouridine
  modified_base 15: mod_base = um
  modified_base 16: mod_base = OTHER; note = 2'-fluorouridine
  modified_base 17: mod_base = gm
  modified_base 18: mod_base = OTHER; note = 2'-fluorouridine
  modified_base 19: mod_base = cm
  modified_base 20: mod_base = um
  modified_base 20^21: mod_base = OTHER; note = phosphorothioate linkage
  modified_base 21: mod_base = cm
  source 1..21: mol_type = other RNA
ttgaacacttcgctttgtctc

SEQ ID NO: 1172 - RNA, 21 nt, synthetic construct
  modified_base 1: mod_base = OTHER; note = 2'-O-methyladenosine
  modified_base 1^2: mod_base = OTHER; note = phosphorothioate linkage
  modified_base 2: mod_base = OTHER; note = 2'-fluoroguanosine
  modified_base 2^3: mod_base = OTHER; note = phosphorothioate linkage
  modified_base 3: mod_base = OTHER; note = 2'-O-methyladenosine
  modified_base 3^4: mod_base = OTHER; note = phosphorothioate linkage
  modified_base 4: mod_base = OTHER; note = 2'-fluorouridine
  modified_base 5: mod_base = um
  modified_base 6: mod_base = OTHER; note = 2'-fluorocytidine
  modified_base 7: mod_base = um
  modified_base 8: mod_base = OTHER; note = 2'-O-methyladenosine
  modified_base 9: mod_base = gm
  modified_base 10: mod_base = OTHER; note = 2'-O-methyladenosine
  modified_base 11: mod_base = gm
  modified_base 12: mod_base = OTHER; note = 2'-fluoroguanosine
  modified_base 13: mod_base = um
  modified_base 14: mod_base = OTHER; note = 2'-fluorocytidine
  modified_base 15: mod_base = OTHER; note = 2'-O-methyladenosine
  modified_base 16: mod_base = OTHER; note = 2'-fluorocytidine
  modified_base 17: mod_base = um
  modified_base 18: mod_base = OTHER; note = 2'-fluoroguanosine
  modified_base 19: mod_base = gm
  modified_base 20: mod_base = OTHER; note = 2'-O-methyladenosine
  modified_base 20^21: mod_base = OTHER; note = phosphorothioate linkage
  modified_base 21: mod_base = OTHER; note = 2'-O-methyladenosine
  source 1..21: mol_type = other RNA
agattctagaggtcactggaa

SEQ ID NO: 1173 - RNA, 21 nt, synthetic construct
  modified_base 1: mod_base = um
  modified_base 1^2: mod_base = OTHER; note = phosphorothioate linkage
  modified_base 2: mod_base = OTHER; note = 2'-fluoroguanosine
  modified_base 2^3: mod_base = OTHER; note = phosphorothioate linkage
  modified_base 3: mod_base = gm
  modified_base 3^4: mod_base = OTHER; note = phosphorothioate linkage
  modified_base 4: mod_base = OTHER; note = 2'-fluoroadenosine
  modified_base 5: mod_base = OTHER; note = 2'-O-methyladenosine
  modified_base 6: mod_base = OTHER; note = 2'-fluorouridine
  modified_base 7: mod_base = OTHER; note = 2'-O-methyladenosine
  modified_base 8: mod_base = gm
  modified_base 9: mod_base = um
  modified_base 10: mod_base = gm
  modified_base 11: mod_base = um
  modified_base 12: mod_base = OTHER; note = 2'-fluoroguanosine
  modified_base 13: mod_base = cm
  modified_base 14: mod_base = OTHER; note = 2'-fluoroadenosine
  modified_base 15: mod_base = OTHER; note = 2'-O-methyladenosine
  modified_base 16: mod_base = OTHER; note = 2'-fluoroadenosine
  modified_base 17: mod_base = um
  modified_base 18: mod_base = OTHER; note = 2'-fluoroguanosine
  modified_base 19: mod_base = cm
  modified_base 20: mod_base = um
  modified_base 20^21: mod_base = OTHER; note = phosphorothioate linkage
  modified_base 21: mod_base = cm
  source 1..21: mol_type = other RNA
tggaatagtgtgcaaatgctc

SEQ ID NO: 1174 - RNA, 21 nt, synthetic construct
  modified_base 1: mod_base = um
  modified_base 1^2: mod_base = OTHER; note = phosphorothioate linkage
  modified_base 2: mod_base = OTHER; note = 2'-fluorouridine
  modified_base 2^3: mod_base = OTHER; note = phosphorothioate linkage
  modified_base 3: mod_base = gm
  modified_base 3^4: mod_base = OTHER; note = phosphorothioate linkage
  modified_base 4: mod_base = OTHER; note = 2'-fluoroadenosine
  modified_base 5: mod_base = um
  modified_base 6: mod_base = OTHER; note = 2'-fluorocytidine
  modified_base 7: mod_base = um
  modified_base 8: mod_base = cm
  modified_base 9: mod_base = OTHER; note = 2'-O-methyladenosine
  modified_base 10: mod_base = OTHER; note = 2'-O-methyladenosine
  modified_base 11: mod_base = OTHER; note = 2'-O-methyladenosine
  modified_base 12: mod_base = OTHER; note = 2'-fluorocytidine
  modified_base 13: mod_base = OTHER; note = 2'-O-methyladenosine
  modified_base 14: mod_base = OTHER; note = 2'-fluorouridine
  modified_base 15: mod_base = cm
  modified_base 16: mod_base = OTHER; note = 2'-fluorouridine
  modified_base 17: mod_base = gm
  modified_base 18: mod_base = OTHER; note = 2'-fluorouridine
  modified_base 19: mod_base = cm
  modified_base 20: mod_base = OTHER; note = 2'-O-methyladenosine
  modified_base 20^21: mod_base = OTHER; note = phosphorothioate linkage
  modified_base 21: mod_base = um
  source 1..21: mol_type = other RNA
ttgatctcaaacatctgtcat

SEQ ID NO: 1175 - RNA, 21 nt, synthetic construct
  modified_base 1: mod_base = um
  modified_base 1^2: mod_base = OTHER; note = phosphorothioate linkage
  modified_base 2: mod_base = OTHER; note = 2'-fluoroadenosine
  modified_base 2^3: mod_base = OTHER; note = phosphorothioate linkage
  modified_base 3: mod_base = gm
  modified_base 3^4: mod_base = OTHER; note = phosphorothioate linkage
  modified_base 4: mod_base = OTHER; note = 2'-fluorocytidine
  modified_base 5: mod_base = OTHER; note = 2'-O-methyladenosine
  modified_base 6: mod_base = OTHER; note = 2'-fluorouridine
  modified_base 7: mod_base = OTHER; note = 2'-O-methyladenosine
  modified_base 8: mod_base = OTHER; note = 2'-O-methyladenosine
  modified_base 9: mod_base = gm
  modified_base 10: mod_base = um
  modified_base 11: mod_base = um
  modified_base 12: mod_base = OTHER; note = 2'-fluoroguanosine
  modified_base 13: mod_base = cm
  modified_base 14: mod_base = OTHER; note = 2'-fluorocytidine
  modified_base 15: mod_base = OTHER; note = 2'-O-methyladenosine
  modified_base 16: mod_base = OTHER; note = 2'-fluorocytidine
  modified_base 17: mod_base = OTHER; note = 2'-O-methyladenosine
  modified_base 18: mod_base = OTHER; note = 2'-fluorocytidine
  modified_base 19: mod_base = OTHER; note = 2'-O-methyladenosine
  modified_base 20: mod_base = gm
  modified_base 20^21: mod_base = OTHER; note = phosphorothioate linkage
  modified_base 21: mod_base = OTHER; note = 2'-O-methyladenosine
  source 1..21: mol_type = other RNA
tagcataagttgccacacaga

SEQ ID NO: 1176 - RNA, 21 nt, synthetic construct
  modified_base 1: mod_base = um
  modified_base 1^2: mod_base = OTHER; note = phosphorothioate linkage
  modified_base 2: mod_base = OTHER; note = 2'-fluorocytidine
  modified_base 2^3: mod_base = OTHER; note = phosphorothioate linkage
  modified_base 3: mod_base = OTHER; note = 2'-O-methyladenosine
  modified_base 3^4: mod_base = OTHER; note = phosphorothioate linkage
  modified_base 4: mod_base = OTHER; note = 2'-fluorocytidine
  modified_base 5: mod_base = OTHER; note = 2'-O-methyladenosine
  modified_base 6: mod_base = OTHER; note = 2'-fluoroadenosine
  modified_base 7: mod_base = um
  modified_base 8: mod_base = cm
  modified_base 9: mod_base = OTHER; note = 2'-O-methyladenosine
  modified_base 10: mod_base = OTHER; note = 2'-O-methyladenosine
  modified_base 11: mod_base = gm
  modified_base 12: mod_base = OTHER; note = 2'-fluoroguanosine
  modified_base 13: mod_base = um
  modified_base 14: mod_base = OTHER; note = 2'-fluorocytidine
  modified_base 15: mod_base = um
  modified_base 16: mod_base = OTHER; note = 2'-fluoroguanosine
  modified_base 17: mod_base = gm
  modified_base 18: mod_base = OTHER; note = 2'-fluorouridine
  modified_base 19: mod_base = cm
  modified_base 20: mod_base = um
  modified_base 20^21: mod_base = OTHER; note = phosphorothioate linkage
  modified_base 21: mod_base = gm
  source 1..21: mol_type = other RNA
tcacaatcaaggtctggtctg

SEQ ID NO: 1177 - RNA, 21 nt, synthetic construct
  modified_base 1: mod_base = OTHER; note = 2'-O-methyladenosine
  modified_base 1^2: mod_base = OTHER; note = phosphorothioate linkage
  modified_base 2: mod_base = OTHER; note = 2'-fluoroguanosine
  modified_base 2^3: mod_base = OTHER; note = phosphorothioate linkage
  modified_base 3: mod_base = OTHER; note = 2'-O-methyladenosine
  modified_base 3^4: mod_base = OTHER; note = phosphorothioate linkage
  modified_base 4: mod_base = OTHER; note = 2'-fluoroadenosine
  modified_base 5: mod_base = OTHER; note = 2'-O-methyladenosine
  modified_base 6: mod_base = OTHER; note = 2'-fluoroguanosine
  modified_base 7: mod_base = OTHER; note = 2'-O-methyladenosine
  modified_base 8: mod_base = gm
  modified_base 9: mod_base = OTHER; note = 2'-O-methyladenosine
  modified_base 10: mod_base = gm
  modified_base 11: mod_base = um
  modified_base 12: mod_base = OTHER; note = 2'-fluoroguanosine
  modified_base 13: mod_base = cm
  modified_base 14: mod_base = OTHER; note = 2'-fluorouridine
  modified_base 15: mod_base = um
  modified_base 16: mod_base = OTHER; note = 2'-fluorocytidine
  modified_base 17: mod_base = um
  modified_base 18: mod_base = OTHER; note = 2'-fluorocytidine
  modified_base 19: mod_base = cm
  modified_base 20: mod_base = cm
  modified_base 20^21: mod_base = OTHER; note = phosphorothioate linkage
  modified_base 21: mod_base = um
  source 1..21: mol_type = other RNA
agaaagagagtgcttctccct

SEQ ID NO: 1178 - RNA, 21 nt, synthetic construct
  modified_base 1: mod_base = um
  modified_base 1^2: mod_base = OTHER; note = phosphorothioate linkage
  modified_base 2: mod_base = OTHER; note = 2'-fluoroguanosine
  modified_base 2^3: mod_base = OTHER; note = phosphorothioate linkage
  modified_base 3: mod_base = um
  modified_base 3^4: mod_base = OTHER; note = phosphorothioate linkage
  modified_base 4: mod_base = OTHER; note = 2'-fluorouridine
  modified_base 5: mod_base = OTHER; note = 2'-O-methyladenosine
  modified_base 6: mod_base = OTHER; note = 2'-fluoroguanosine
  modified_base 7: mod_base = OTHER; note = 2'-O-methyladenosine
  modified_base 8: mod_base = gm
  modified_base 9: mod_base = OTHER; note = 2'-O-methyladenosine
  modified_base 10: mod_base = gm
  modified_base 11: mod_base = OTHER; note = 2'-O-methyladenosine
  modified_base 12: mod_base = OTHER; note = 2'-fluoroguanosine
  modified_base 13: mod_base = um
  modified_base 14: mod_base = OTHER; note = 2'-fluorouridine
  modified_base 15: mod_base = um
  modified_base 16: mod_base = OTHER; note = 2'-fluoroguanosine
  modified_base 17: mod_base = gm
  modified_base 18: mod_base = OTHER; note = 2'-fluorouridine
  modified_base 19: mod_base = um
  modified_base 20: mod_base = um
  modified_base 20^21: mod_base = OTHER; note = phosphorothioate linkage
  modified_base 21: mod_base = cm
  source 1..21: mol_type = other RNA
tgttagagagagtttggtttc

SEQ ID NO: 1179 - RNA, 21 nt, synthetic construct
  modified_base 1: mod_base = um
  modified_base 1^2: mod_base = OTHER; note = phosphorothioate linkage
  modified_base 2: mod_base = OTHER; note = 2'-fluoroadenosine
  modified_base 2^3: mod_base = OTHER; note = phosphorothioate linkage
  modified_base 3: mod_base = OTHER; note = 2'-O-methyladenosine
  modified_base 3^4: mod_base = OTHER; note = phosphorothioate linkage
  modified_base 4: mod_base = OTHER; note = 2'-fluoroguanosine
  modified_base 5: mod_base = gm
  modified_base 6: mod_base = OTHER; note = 2'-fluorouridine
  modified_base 7: mod_base = um
  modified_base 8: mod_base = OTHER; note = 2'-O-methyladenosine
  modified_base 9: mod_base = gm
  modified_base 10: mod_base = OTHER; note = 2'-O-methyladenosine
  modified_base 11: mod_base = gm
  modified_base 12: mod_base = OTHER; note = 2'-fluoroadenosine
  modified_base 13: mod_base = gm
  modified_base 14: mod_base = OTHER; note = 2'-fluoroadenosine
  modified_base 15: mod_base = gm
  modified_base 16: mod_base = OTHER; note = 2'-fluorouridine
  modified_base 17: mod_base = um
  modified_base 18: mod_base = OTHER; note = 2'-fluorouridine
  modified_base 19: mod_base = gm
  modified_base 20: mod_base = gm
  modified_base 20^21: mod_base = OTHER; note = phosphorothioate linkage
  modified_base 21: mod_base = um
  source 1..21: mol_type = other RNA
taaggttagagagagtttggt

SEQ ID NO: 1180 - RNA, 21 nt, synthetic construct
  modified_base 1: mod_base = um
  modified_base 1^2: mod_base = OTHER; note = phosphorothioate linkage
  modified_base 2: mod_base = OTHER; note = 2'-fluoroguanosine
  modified_base 2^3: mod_base = OTHER; note = phosphorothioate linkage
  modified_base 3: mod_base = gm
  modified_base 3^4: mod_base = OTHER; note = phosphorothioate linkage
  modified_base 4: mod_base = OTHER; note = 2'-fluorouridine
  modified_base 5: mod_base = um
  modified_base 6: mod_base = OTHER; note = 2'-fluorouridine
  modified_base 7: mod_base = um
  modified_base 8: mod_base = gm
  modified_base 9: mod_base = um
  modified_base 10: mod_base = OTHER; note = 2'-O-methyladenosine
  modified_base 11: mod_base = OTHER; note = 2'-O-methyladenosine
  modified_base 12: mod_base = OTHER; note = 2'-fluorocytidine
  modified_base 13: mod_base = um
  modified_base 14: mod_base = OTHER; note = 2'-fluorouridine
  modified_base 15: mod_base = OTHER; note = 2'-O-methyladenosine
  modified_base 16: mod_base = OTHER; note = 2'-fluorocytidine
  modified_base 17: mod_base = OTHER; note = 2'-O-methyladenosine
  modified_base 18: mod_base = OTHER; note = 2'-fluorouridine
  modified_base 19: mod_base = cm
  modified_base 20: mod_base = OTHER; note = 2'-O-methyladenosine
  modified_base 20^21: mod_base = OTHER; note = phosphorothioate linkage
  modified_base 21: mod_base = cm
  source 1..21: mol_type = other RNA
tggttttgtaacttacatcac

SEQ ID NO: 1181 - RNA, 21 nt, synthetic construct
  modified_base 1: mod_base = um
  modified_base 1^2: mod_base = OTHER; note = phosphorothioate linkage
  modified_base 2: mod_base = OTHER; note = 2'-fluorocytidine
  modified_base 2^3: mod_base = OTHER; note = phosphorothioate linkage
  modified_base 3: mod_base = OTHER; note = 2'-O-methyladenosine
  modified_base 3^4: mod_base = OTHER; note = phosphorothioate linkage
  modified_base 4: mod_base = OTHER; note = 2'-fluorocytidine
  modified_base 5: mod_base = um
  modified_base 6: mod_base = OTHER; note = 2'-fluorouridine
  modified_base 7: mod_base = um
  modified_base 8: mod_base = cm
  modified_base 9: mod_base = OTHER; note = 2'-O-methyladenosine
  modified_base 10: mod_base = um
  modified_base 11: mod_base = cm
  modified_base 12: mod_base = OTHER; note = 2'-fluoroadenosine
  modified_base 13: mod_base = cm
  modified_base 14: mod_base = OTHER; note = 2'-fluoroadenosine
  modified_base 15: mod_base = gm
  modified_base 16: mod_base = OTHER; note = 2'-fluoroguanosine
  modified_base 17: mod_base = um
  modified_base 18: mod_base = OTHER; note = 2'-fluoroguanosine
  modified_base 19: mod_base = gm
  modified_base 20: mod_base = um
  modified_base 20^21: mod_base = OTHER; note = phosphorothioate linkage
  modified_base 21: mod_base = um
  source 1..21: mol_type = other RNA
tcactttcatcacaggtggtt

SEQ ID NO: 1182 - RNA, 21 nt, synthetic construct
  modified_base 1: mod_base = um
  modified_base 1^2: mod_base = OTHER; note = phosphorothioate linkage
  modified_base 2: mod_base = OTHER; note = 2'-fluoroguanosine
  modified_base 2^3: mod_base = OTHER; note = phosphorothioate linkage
  modified_base 3: mod_base = OTHER; note = 2'-O-methyladenosine
  modified_base 3^4: mod_base = OTHER; note = phosphorothioate linkage
  modified_base 4: mod_base = OTHER; note = 2'-fluorouridine
  modified_base 5: mod_base = um
  modified_base 6: mod_base = OTHER; note = 2'-fluoroadenosine
  modified_base 7: mod_base = um
  modified_base 8: mod_base = OTHER; note = 2'-O-methyladenosine
  modified_base 9: mod_base = OTHER; note = 2'-O-methyladenosine
  modified_base 10: mod_base = OTHER; note = 2'-O-methyladenosine
  modified_base 11: mod_base = um
  modified_base 12: mod_base = OTHER; note = 2'-fluoroguanosine
  modified_base 13: mod_base = cm
  modified_base 14: mod_base = OTHER; note = 2'-fluoroadenosine
  modified_base 15: mod_base = cm
  modified_base 16: mod_base = OTHER; note = 2'-fluorocytidine
  modified_base 17: mod_base = OTHER; note = 2'-O-methyladenosine
  modified_base 18: mod_base = OTHER; note = 2'-fluoroguanosine
  modified_base 19: mod_base = um
  modified_base 20: mod_base = cm
  modified_base 20^21: mod_base = OTHER; note = phosphorothioate linkage
  modified_base 21: mod_base = OTHER; note = 2'-O-methyladenosine
  source 1..21: mol_type = other RNA
tgattataaatgcaccagtca

SEQ ID NO: 1183 - RNA, 21 nt, synthetic construct
  modified_base 1: mod_base = um
  modified_base 1^2: mod_base = OTHER; note = phosphorothioate linkage
  modified_base 2: mod_base = OTHER; note = 2'-fluoroadenosine
  modified_base 2^3: mod_base = OTHER; note = phosphorothioate linkage
  modified_base 3: mod_base = gm
  modified_base 3^4: mod_base = OTHER; note = phosphorothioate linkage
  modified_base 4: mod_base = OTHER; note = 2'-fluoroadenosine
  modified_base 5: mod_base = gm
  modified_base 6: mod_base = OTHER; note = 2'-fluorouridine
  modified_base 7: mod_base = um
  modified_base 8: mod_base = OTHER; note = 2'-O-methyladenosine
  modified_base 9: mod_base = um
  modified_base 10: mod_base = OTHER; note = 2'-O-methyladenosine
  modified_base 11: mod_base = gm
  modified_base 12: mod_base = OTHER; note = 2'-fluorouridine
  modified_base 13: mod_base = cm
  modified_base 14: mod_base = OTHER; note = 2'-fluoroadenosine
  modified_base 15: mod_base = gm
  modified_base 16: mod_base = OTHER; note = 2'-fluoroadenosine
  modified_base 17: mod_base = gm
  modified_base 18: mod_base = OTHER; note = 2'-fluorocytidine
  modified_base 19: mod_base = um
  modified_base 20: mod_base = gm
  modified_base 20^21: mod_base = OTHER; note = phosphorothioate linkage
  modified_base 21: mod_base = um
  source 1..21: mol_type = other RNA
tagagttatagtcagagctgt

SEQ ID NO: 1184 - RNA, 21 nt, synthetic construct
  modified_base 1: mod_base = um
  modified_base 1^2: mod_base = OTHER; note = phosphorothioate linkage
  modified_base 2: mod_base = OTHER; note = 2'-fluorouridine
  modified_base 2^3: mod_base = OTHER; note = phosphorothioate linkage
  modified_base 3: mod_base = OTHER; note = 2'-O-methyladenosine
  modified_base 3^4: mod_base = OTHER; note = phosphorothioate linkage
  modified_base 4: mod_base = OTHER; note = 2'-fluoroguanosine
  modified_base 5: mod_base = gm
  modified_base 6: mod_base = OTHER; note = 2'-fluoroadenosine
  modified_base 7: mod_base = um
  modified_base 8: mod_base = gm
  modified_base 9: mod_base = cm
  modified_base 10: mod_base = um
  modified_base 11: mod_base = cm
  modified_base 12: mod_base = OTHER; note = 2'-fluorouridine
  modified_base 13: mod_base = gm
  modified_base 14: mod_base = OTHER; note = 2'-fluorouridine
  modified_base 15: mod_base = OTHER; note = 2'-O-methyladenosine
  modified_base 16: mod_base = OTHER; note = 2'-fluoroadenosine
  modified_base 17: mod_base = OTHER; note = 2'-O-methyladenosine
  modified_base 18: mod_base = OTHER; note = 2'-fluoroguanosine
  modified_base 19: mod_base = gm
  modified_base 20: mod_base = um
  modified_base 20^21: mod_base = OTHER; note = phosphorothioate linkage
  modified_base 21: mod_base = OTHER; note = 2'-O-methyladenosine
  source 1..21: mol_type = other RNA
ttaggatgctctgtaaaggta

SEQ ID NO: 1185 - RNA, 21 nt, synthetic construct
  modified_base 1: mod_base = OTHER; note = 2'-O-methyladenosine
  modified_base 1^2: mod_base = OTHER; note = phosphorothioate linkage
  modified_base 2: mod_base = OTHER; note = 2'-fluoroguanosine
  modified_base 2^3: mod_base = OTHER; note = phosphorothioate linkage
  modified_base 3: mod_base = um
  modified_base 3^4: mod_base = OTHER; note = phosphorothioate linkage
  modified_base 4: mod_base = OTHER; note = 2'-fluorouridine
  modified_base 5: mod_base = OTHER; note = 2'-O-methyladenosine
  modified_base 6: mod_base = OTHER; note = 2'-fluoroguanosine
  modified_base 7: mod_base = OTHER; note = 2'-O-methyladenosine
  modified_base 8: mod_base = cm
  modified_base 9: mod_base = um
  modified_base 10: mod_base = um
  modified_base 11: mod_base = OTHER; note = 2'-O-methyladenosine
  modified_base 12: mod_base = OTHER; note = 2'-fluoroadenosine
  modified_base 13: mod_base = cm
  modified_base 14: mod_base = OTHER; note = 2'-fluorouridine
  modified_base 15: mod_base = um
  modified_base 16: mod_base = OTHER; note = 2'-fluoroadenosine
  modified_base 17: mod_base = gm
  modified_base 18: mod_base = OTHER; note = 2'-fluorouridine
  modified_base 19: mod_base = um
  modified_base 20: mod_base = cm
  modified_base 20^21: mod_base = OTHER; note = phosphorothioate linkage
  modified_base 21: mod_base = cm
  source 1..21: mol_type = other RNA
agttagacttaacttagttcc

SEQ ID NO: 1186 - RNA, 21 nt, synthetic construct
  modified_base 1: mod_base = OTHER; note = 2'-O-methyladenosine
  modified_base 1^2: mod_base = OTHER; note = phosphorothioate linkage
  modified_base 2: mod_base = OTHER; note = 2'-fluoroguanosine
  modified_base 2^3: mod_base = OTHER; note = phosphorothioate linkage
  modified_base 3: mod_base = um
  modified_base 3^4: mod_base = OTHER; note = phosphorothioate linkage
  modified_base 4: mod_base = OTHER; note = 2'-fluoroadenosine
  modified_base 5: mod_base = OTHER; note = 2'-O-methyladenosine
  modified_base 6: mod_base = OTHER; note = 2'-fluoroadenosine
  modified_base 7: mod_base = um
  modified_base 8: mod_base = um
  modified_base 9: mod_base = cm
  modified_base 10: mod_base = OTHER; note = 2'-O-methyladenosine
  modified_base 11: mod_base = OTHER; note = 2'-O-methyladenosine
  modified_base 12: mod_base = OTHER; note = 2'-fluorouridine
  modified_base 13: mod_base = cm
  modified_base 14: mod_base = OTHER; note = 2'-fluorouridine
  modified_base 15: mod_base = cm
  modified_base 16: mod_base = OTHER; note = 2'-fluorouridine
  modified_base 17: mod_base = cm
  modified_base 18: mod_base = OTHER; note = 2'-fluorouridine
  modified_base 19: mod_base = gm
  modified_base 20: mod_base = OTHER; note = 2'-O-methyladenosine
  modified_base 20^21: mod_base = OTHER; note = phosphorothioate linkage
  modified_base 21: mod_base = gm
  source 1..21: mol_type = other RNA
agtaaattcaatctctctgag

SEQ ID NO: 1187 - RNA, 21 nt, synthetic construct
  modified_base 1: mod_base = um
  modified_base 1^2: mod_base = OTHER; note = phosphorothioate linkage
  modified_base 2: mod_base = OTHER; note = 2'-fluoroguanosine
  modified_base 2^3: mod_base = OTHER; note = phosphorothioate linkage
  modified_base 3: mod_base = um
  modified_base 3^4: mod_base = OTHER; note = phosphorothioate linkage
  modified_base 4: mod_base = OTHER; note = 2'-fluorouridine
  modified_base 5: mod_base = gm
  modified_base 6: mod_base = OTHER; note = 2'-fluoroadenosine
  modified_base 7: mod_base = um
  modified_base 8: mod_base = gm
  modified_base 9: mod_base = um
  modified_base 10: mod_base = um
  modified_base 11: mod_base = OTHER; note = 2'-O-methyladenosine
  modified_base 12: mod_base = OTHER; note = 2'-fluoroadenosine
  modified_base 13: mod_base = cm
  modified_base 14: mod_base = OTHER; note = 2'-fluorocytidine
  modified_base 15: mod_base = OTHER; note = 2'-O-methyladenosine
  modified_base 16: mod_base = OTHER; note = 2'-fluoroguanosine
  modified_base 17: mod_base = OTHER; note = 2'-O-methyladenosine
  modified_base 18: mod_base = OTHER; note = 2'-fluoroguanosine
  modified_base 19: mod_base = cm
  modified_base 20: mod_base = um
  modified_base 20^21: mod_base = OTHER; note = phosphorothioate linkage
  modified_base 21: mod_base = gm
  source 1..21: mol_type = other RNA
tgttgatgttaaccagagctg

SEQ ID NO: 1188 - RNA, 21 nt, synthetic construct
  modified_base 1: mod_base = OTHER; note = 2'-O-methyladenosine
  modified_base 1^2: mod_base = OTHER; note = phosphorothioate linkage
  modified_base 2: mod_base = OTHER; note = 2'-fluoroadenosine
  modified_base 2^3: mod_base = OTHER; note = phosphorothioate linkage
  modified_base 3: mod_base = OTHER; note = 2'-O-methyladenosine
  modified_base 3^4: mod_base = OTHER; note = phosphorothioate linkage
  modified_base 4: mod_base = OTHER; note = 2'-fluorocytidine
  modified_base 5: mod_base = um
  modified_base 6: mod_base = OTHER; note = 2'-fluoroadenosine
  modified_base 7: mod_base = um
  modified_base 8: mod_base = gm
  modified_base 9: mod_base = OTHER; note = 2'-O-methyladenosine
  modified_base 10: mod_base = um
  modified_base 11: mod_base = gm
  modified_base 12: mod_base = OTHER; note = 2'-fluorouridine
  modified_base 13: mod_base = cm
  modified_base 14: mod_base = OTHER; note = 2'-fluoroadenosine
  modified_base 15: mod_base = gm
  modified_base 16: mod_base = OTHER; note = 2'-fluoroguanosine
  modified_base 17: mod_base = um
  modified_base 18: mod_base = OTHER; note = 2'-fluorocytidine
  modified_base 19: mod_base = OTHER; note = 2'-O-methyladenosine
  modified_base 20: mod_base = OTHER; note = 2'-O-methyladenosine
  modified_base 20^21: mod_base = OTHER; note = phosphorothioate linkage
  modified_base 21: mod_base = cm
  source 1..21: mol_type = other RNA
aaactatgatgtcaggtcaac

SEQ ID NO: 1189 - RNA, 21 nt, synthetic construct
  modified_base 1: mod_base = OTHER; note = 2'-O-methyladenosine
  modified_base 1^2: mod_base = OTHER; note = phosphorothioate linkage
  modified_base 2: mod_base = OTHER; note = 2'-fluorocytidine
  modified_base 2^3: mod_base = OTHER; note = phosphorothioate linkage
  modified_base 3: mod_base = OTHER; note = 2'-O-methyladenosine
  modified_base 3^4: mod_base = OTHER; note = phosphorothioate linkage
  modified_base 4: mod_base = OTHER; note = 2'-fluorouridine
  modified_base 5: mod_base = um
  modified_base 6: mod_base = OTHER; note = 2'-fluoroadenosine
  modified_base 7: mod_base = OTHER; note = 2'-O-methyladenosine
  modified_base 8: mod_base = cm
  modified_base 9: mod_base = gm
  modified_base 10: mod_base = OTHER; note = 2'-O-methyladenosine
  modified_base 11: mod_base = gm
  modified_base 12: mod_base = OTHER; note = 2'-fluoroadenosine
  modified_base 13: mod_base = um
  modified_base 14: mod_base = OTHER; note = 2'-fluorocytidine
  modified_base 15: mod_base = um
  modified_base 16: mod_base = OTHER; note = 2'-fluoroguanosine
  modified_base 17: mod_base = um
  modified_base 18: mod_base = OTHER; note = 2'-fluorouridine
  modified_base 19: mod_base = um
  modified_base 20: mod_base = gm
  modified_base 20^21: mod_base = OTHER; note = phosphorothioate linkage
  modified_base 21: mod_base = OTHER; note = 2'-O-methyladenosine
  source 1..21: mol_type = other RNA
acattaacgagatctgtttga

SEQ ID NO: 1190 - RNA, 21 nt, synthetic construct
  modified_base 1: mod_base = um
  modified_base 1^2: mod_base = OTHER; note = phosphorothioate linkage
  modified_base 2: mod_base = OTHER; note = 2'-fluorocytidine
  modified_base 2^3: mod_base = OTHER; note = phosphorothioate linkage
  modified_base 3: mod_base = OTHER; note = 2'-O-methyladenosine
  modified_base 3^4: mod_base = OTHER; note = phosphorothioate linkage
  modified_base 4: mod_base = OTHER; note = 2'-fluoroguanosine
  modified_base 5: mod_base = OTHER; note = 2'-O-methyladenosine
  modified_base 6: mod_base = OTHER; note = 2'-fluoroadenosine
  modified_base 7: mod_base = um
  modified_base 8: mod_base = OTHER; note = 2'-O-methyladenosine
  modified_base 9: mod_base = um
  modified_base 10: mod_base = OTHER; note = 2'-O-methyladenosine
  modified_base 11: mod_base = gm
  modified_base 12: mod_base = OTHER; note = 2'-fluorocytidine
  modified_base 13: mod_base = um
  modified_base 14: mod_base = OTHER; note = 2'-fluorouridine
  modified_base 15: mod_base = um
  modified_base 16: mod_base = OTHER; note = 2'-fluoroadenosine
  modified_base 17: mod_base = OTHER; note = 2'-O-methyladenosine
  modified_base 18: mod_base = OTHER; note = 2'-fluoroguanosine
  modified_base 19: mod_base = OTHER; note = 2'-O-methyladenosine
  modified_base 20: mod_base = OTHER; note = 2'-O-methyladenosine
  modified_base 20^21: mod_base = OTHER; note = phosphorothioate linkage
  modified_base 21: mod_base = cm
  source 1..21: mol_type = other RNA
tcagaatatagctttaagaac

SEQ ID NO: 1191 - RNA, 21 nt, synthetic construct
  modified_base 1: mod_base = OTHER; note = 2'-O-methyladenosine
  modified_base 1^2: mod_base = OTHER; note = phosphorothioate linkage
  modified_base 2: mod_base = OTHER; note = 2'-fluoroguanosine
  modified_base 2^3: mod_base = OTHER; note = phosphorothioate linkage
  modified_base 3: mod_base = um
  modified_base 3^4: mod_base = OTHER; note = phosphorothioate linkage
  modified_base 4: mod_base = OTHER; note = 2'-fluoroadenosine
  modified_base 5: mod_base = gm
  modified_base 6: mod_base = OTHER; note = 2'-fluorouridine
  modified_base 7: mod_base = OTHER; note = 2'-O-methyladenosine
  modified_base 8: mod_base = gm
  modified_base 9: mod_base = gm
  modified_base 10: mod_base = um
  modified_base 11: mod_base = cm
  modified_base 12: mod_base = OTHER; note = 2'-fluorocytidine
  modified_base 13: mod_base = um
  modified_base 14: mod_base = OTHER; note = 2'-fluorouridine
  modified_base 15: mod_base = um
  modified_base 16: mod_base = OTHER; note = 2'-fluoroguanosine
  modified_base 17: mod_base = um
  modified_base 18: mod_base = OTHER; note = 2'-fluoroguanosine
  modified_base 19: mod_base = um
  modified_base 20: mod_base = OTHER; note = 2'-O-methyladenosine
  modified_base 20^21: mod_base = OTHER; note = phosphorothioate linkage
  modified_base 21: mod_base = gm
  source 1..21: mol_type = other RNA
agtagtaggtcctttgtgtag

SEQ ID NO: 1192 - RNA, 21 nt, synthetic construct
  modified_base 1: mod_base = um
  modified_base 1^2: mod_base = OTHER; note = phosphorothioate linkage
  modified_base 2: mod_base = OTHER; note = 2'-fluorouridine
  modified_base 2^3: mod_base = OTHER; note = phosphorothioate linkage
  modified_base 3: mod_base = gm
  modified_base 3^4: mod_base = OTHER; note = phosphorothioate linkage
  modified_base 4: mod_base = OTHER; note = 2'-fluorocytidine
  modified_base 5: mod_base = um
  modified_base 6: mod_base = OTHER; note = 2'-fluoroadenosine
  modified_base 7: mod_base = um
  modified_base 8: mod_base = um
  modified_base 9: mod_base = um
  modified_base 10: mod_base = gm
  modified_base 11: mod_base = OTHER; note = 2'-O-methyladenosine
  modified_base 12: mod_base = OTHER; note = 2'-fluorouridine
  modified_base 13: mod_base = gm
  modified_base 14: mod_base = OTHER; note = 2'-fluoroadenosine
  modified_base 15: mod_base = gm
  modified_base 16: mod_base = OTHER; note = 2'-fluoroguanosine
  modified_base 17: mod_base = OTHER; note = 2'-O-methyladenosine
  modified_base 18: mod_base = OTHER; note = 2'-fluorocytidine
  modified_base 19: mod_base = gm
  modified_base 20: mod_base = um
  modified_base 20^21: mod_base = OTHER; note = phosphorothioate linkage
  modified_base 21: mod_base = cm
  source 1..21: mol_type = other RNA
ttgctatttgatgaggacgtc

SEQ ID NO: 1193 - RNA, 21 nt, synthetic construct
  modified_base 1: mod_base = OTHER; note = 2'-O-methyladenosine
  modified_base 1^2: mod_base = OTHER; note = phosphorothioate linkage
  modified_base 2: mod_base = OTHER; note = 2'-fluorouridine
  modified_base 2^3: mod_base = OTHER; note = phosphorothioate linkage
  modified_base 3: mod_base = gm
  modified_base 3^4: mod_base = OTHER; note = phosphorothioate linkage
  modified_base 4: mod_base = OTHER; note = 2'-fluorouridine
  modified_base 5: mod_base = OTHER; note = 2'-O-methyladenosine
  modified_base 6: mod_base = OTHER; note = 2'-fluoroguanosine
  modified_base 7: mod_base = OTHER; note = 2'-O-methyladenosine
  modified_base 8: mod_base = gm
  modified_base 9: mod_base = gm
  modified_base 10: mod_base = um
  modified_base 11: mod_base = cm
  modified_base 12: mod_base = OTHER; note = 2'-fluorouridine
  modified_base 13: mod_base = cm
  modified_base 14: mod_base = OTHER; note = 2'-fluoroadenosine
  modified_base 15: mod_base = gm
  modified_base 16: mod_base = OTHER; note = 2'-fluorouridine
  modified_base 17: mod_base = um
  modified_base 18: mod_base = OTHER; note = 2'-fluorocytidine
  modified_base 19: mod_base = um
  modified_base 20: mod_base = gm
  modified_base 20^21: mod_base = OTHER; note = phosphorothioate linkage
  modified_base 21: mod_base = OTHER; note = 2'-O-methyladenosine
  source 1..21: mol_type = other RNA
atgtagaggtctcagttctga

SEQ ID NO: 1194 - RNA, 21 nt, synthetic construct
  modified_base 1: mod_base = OTHER; note = 2'-O-methyladenosine
  modified_base 1^2: mod_base = OTHER; note = phosphorothioate linkage
  modified_base 2: mod_base = OTHER; note = 2'-fluoroadenosine
  modified_base 2^3: mod_base = OTHER; note = phosphorothioate linkage
  modified_base 3: mod_base = OTHER; note = 2'-O-methyladenosine
  modified_base 3^4: mod_base = OTHER; note = phosphorothioate linkage
  modified_base 4: mod_base = OTHER; note = 2'-fluoroguanosine
  modified_base 5: mod_base = OTHER; note = 2'-O-methyladenosine
  modified_base 6: mod_base = OTHER; note = 2'-fluoroadenosine
  modified_base 7: mod_base = OTHER; note = 2'-O-methyladenosine
  modified_base 8: mod_base = OTHER; note = 2'-O-methyladenosine
  modified_base 9: mod_base = um
  modified_base 10: mod_base = gm
  modified_base 11: mod_base = um
  modified_base 12: mod_base = OTHER; note = 2'-fluoroadenosine
  modified_base 13: mod_base = gm
  modified_base 14: mod_base = OTHER; note = 2'-fluoroadenosine
  modified_base 15: mod_base = gm
  modified_base 16: mod_base = OTHER; note = 2'-fluoroguanosine
  modified_base 17: mod_base = um
  modified_base 18: mod_base = OTHER; note = 2'-fluorocytidine
  modified_base 19: mod_base = um
  modified_base 20: mod_base = cm
  modified_base 20^21: mod_base = OTHER; note = phosphorothioate linkage
  modified_base 21: mod_base = OTHER; note = 2'-O-methyladenosine
  source 1..21: mol_type = other RNA
aaagaaaatgtagaggtctca

SEQ ID NO: 1195 - RNA, 21 nt, synthetic construct
  modified_base 1: mod_base = OTHER; note = 2'-O-methyladenosine
  modified_base 1^2: mod_base = OTHER; note = phosphorothioate linkage
  modified_base 2: mod_base = OTHER; note = 2'-fluorocytidine
  modified_base 2^3: mod_base = OTHER; note = phosphorothioate linkage
  modified_base 3: mod_base = gm
  modified_base 3^4: mod_base = OTHER; note = phosphorothioate linkage
  modified_base 4: mod_base = OTHER; note = 2'-fluoroadenosine
  modified_base 5: mod_base = OTHER; note = 2'-O-methyladenosine
  modified_base 6: mod_base = OTHER; note = 2'-fluoroadenosine
  modified_base 7: mod_base = OTHER; note = 2'-O-methyladenosine
  modified_base 8: mod_base = OTHER; note = 2'-O-methyladenosine
  modified_base 9: mod_base = um
  modified_base 10: mod_base = gm
  modified_base 11: mod_base = um
  modified_base 12: mod_base = OTHER; note = 2'-fluoroguanosine
  modified_base 13: mod_base = OTHER; note = 2'-O-methyladenosine
  modified_base 14: mod_base = OTHER; note = 2'-fluoroadenosine
  modified_base 15: mod_base = OTHER; note = 2'-O-methyladenosine
  modified_base 16: mod_base = OTHER; note = 2'-fluoroadenosine
  modified_base 17: mod_base = um
  modified_base 18: mod_base = OTHER; note = 2'-fluorocytidine
  modified_base 19: mod_base = OTHER; note = 2'-O-methyladenosine
  modified_base 20: mod_base = cm
  modified_base 20^21: mod_base = OTHER; note = phosphorothioate linkage
  modified_base 21: mod_base = OTHER; note = 2'-O-methyladenosine
  source 1..21: mol_type = other RNA
acgaaaaatgtgaaaatcaca

SEQ ID NO: 1196 - RNA, 21 nt, synthetic construct
  modified_base 1: mod_base = um
  modified_base 1^2: mod_base = OTHER; note = phosphorothioate linkage
  modified_base 2: mod_base = OTHER; note = 2'-fluorouridine
  modified_base 2^3: mod_base = OTHER; note = phosphorothioate linkage
  modified_base 3: mod_base = OTHER; note = 2'-O-methyladenosine
  modified_base 3^4: mod_base = OTHER; note = phosphorothioate linkage
  modified_base 4: mod_base = OTHER; note = 2'-fluorocytidine
  modified_base 5: mod_base = um
  modified_base 6: mod_base = OTHER; note = 2'-fluoroguanosine
  modified_base 7: mod_base = OTHER; note = 2'-O-methyladenosine
  modified_base 8: mod_base = OTHER; note = 2'-O-methyladenosine
  modified_base 9: mod_base = gm
  modified_base 10: mod_base = um
  modified_base 11: mod_base = cm
  modified_base 12: mod_base = OTHER; note = 2'-fluorocytidine
  modified_base 13: mod_base = um
  modified_base 14: mod_base = OTHER; note = 2'-fluoroadenosine
  modified_base 15: mod_base = cm
  modified_base 16: mod_base = OTHER; note = 2'-fluorouridine
  modified_base 17: mod_base = OTHER; note = 2'-O-methyladenosine
  modified_base 18: mod_base = OTHER; note = 2'-fluoroadenosine
  modified_base 19: mod_base = gm
  modified_base 20: mod_base = um
  modified_base 20^21: mod_base = OTHER; note = phosphorothioate linkage
  modified_base 21: mod_base = um
  source 1..21: mol_type = other RNA
ttactgaagtcctactaagtt

SEQ ID NO: 1197 - DNA, 21 bp, synthetic construct
  modified_base 1: mod_base = OTHER; note = 2'-O-methyladenosine
  modified_base 1^2: mod_base = OTHER; note = phosphorothioate linkage
  modified_base 2: mod_base = OTHER; note = 2'-fluoroguanosine
  modified_base 2^3: mod_base = OTHER; note = phosphorothioate linkage
  modified_base 3: mod_base = OTHER; note = 2'-O-methyladenosine
  modified_base 3^4: mod_base = OTHER; note = phosphorothioate linkage
  modified_base 4: mod_base = OTHER; note = 2'-fluorouridine
  modified_base 5: mod_base = OTHER; note = 2'-O-methyladenosine
  modified_base 6: mod_base = OTHER; note = 2'-fluoroadenosine
  modified_base 7: mod_base = OTHER; note = 2'-O-methyladenosine
  modified_base 8: mod_base = cm
  modified_base 9: mod_base = gm
  modified_base 10: mod_base = gm
  modified_base 11: mod_base = OTHER; note = 2'-O-methyladenosine
  modified_base 12: mod_base = OTHER; note = 2'-fluoroguanosine
  modified_base 13: mod_base = OTHER; note = 2'-O-methyladenosine
  modified_base 14: mod_base = OTHER; note = 2'-fluoroadenosine
  modified_base 15: mod_base = gm
  modified_base 16: mod_base = OTHER; note = 2'-fluorocytidine
  modified_base 17: mod_base = OTHER; note = 2'-O-methyladenosine
  modified_base 18: mod_base = OTHER; note = 2'-fluoroguanosine
  modified_base 19: mod_base = gm
  modified_base 20: mod_base = OTHER; note = 2'-O-methyladenosine
  modified_base 20^21: mod_base = OTHER; note = phosphorothioate linkage
  modified_base 21: mod_base = gm
  source 1..21: mol_type = other DNA
agataaacggagaagcaggag

SEQ ID NO: 1198 - RNA, 21 nt, synthetic construct
  modified_base 1: mod_base = OTHER; note = 2'-O-methyladenosine
  modified_base 1^2: mod_base = OTHER; note = phosphorothioate linkage
  modified_base 2: mod_base = OTHER; note = 2'-fluorocytidine
  modified_base 2^3: mod_base = OTHER; note = phosphorothioate linkage
  modified_base 3: mod_base = OTHER; note = 2'-O-methyladenosine
  modified_base 3^4: mod_base = OTHER; note = phosphorothioate linkage
  modified_base 4: mod_base = OTHER; note = 2'-fluorouridine
  modified_base 5: mod_base = um
  modified_base 6: mod_base = OTHER; note = 2'-fluorocytidine
  modified_base 7: mod_base = um
  modified_base 8: mod_base = OTHER; note = 2'-O-methyladenosine
  modified_base 9: mod_base = gm
  modified_base 10: mod_base = gm
  modified_base 11: mod_base = OTHER; note = 2'-O-methyladenosine
  modified_base 12: mod_base = OTHER; note = 2'-fluorouridine
  modified_base 13: mod_base = OTHER; note = 2'-O-methyladenosine
  modified_base 14: mod_base = OTHER; note = 2'-fluorouridine
  modified_base 15: mod_base = um
  modified_base 16: mod_base = OTHER; note = 2'-fluorocytidine
  modified_base 17: mod_base = um
  modified_base 18: mod_base = OTHER; note = 2'-fluorouridine
  modified_base 19: mod_base = cm
  modified_base 20: mod_base = cm
  modified_base 20^21: mod_base = OTHER; note = phosphorothioate linkage
  modified_base 21: mod_base = OTHER; note = 2'-O-methyladenosine
  source 1..21: mol_type = other RNA
acattctaggatattcttcca

SEQ ID NO: 1199 - RNA, 21 nt, synthetic construct
  modified_base 1: mod_base = um
  modified_base 1^2: mod_base = OTHER; note = phosphorothioate linkage
  modified_base 2: mod_base = OTHER; note = 2'-fluoroadenosine
  modified_base 2^3: mod_base = OTHER; note = phosphorothioate linkage
  modified_base 3: mod_base = OTHER; note = 2'-O-methyladenosine
  modified_base 3^4: mod_base = OTHER; note = phosphorothioate linkage
  modified_base 4: mod_base = OTHER; note = 2'-fluorocytidine
  modified_base 5: mod_base = um
  modified_base 6: mod_base = OTHER; note = 2'-fluoroguanosine
  modified_base 7: mod_base = OTHER; note = 2'-O-methyladenosine
  modified_base 8: mod_base = cm
  modified_base 9: mod_base = OTHER; note = 2'-O-methyladenosine
  modified_base 10: mod_base = um
  modified_base 11: mod_base = OTHER; note = 2'-O-methyladenosine
  modified_base 12: mod_base = OTHER; note = 2'-fluorouridine
  modified_base 13: mod_base = gm
  modified_base 14: mod_base = OTHER; note = 2'-fluorocytidine
  modified_base 15: mod_base = um
  modified_base 16: mod_base = OTHER; note = 2'-fluorouridine
  modified_base 17: mod_base = um
  modified_base 18: mod_base = OTHER; note = 2'-fluorocytidine
  modified_base 19: mod_base = cm
  modified_base 20: mod_base = um
  modified_base 20^21: mod_base = OTHER; note = phosphorothioate linkage
  modified_base 21: mod_base = um
  source 1..21: mol_type = other RNA
taactgacatatgctttcctt

SEQ ID NO: 1200 - RNA, 21 nt, synthetic construct
  modified_base 1: mod_base = OTHER; note = 5'-cyclopropyl phosphonate-2'-O-methyluridine
  modified_base 1^2: mod_base = OTHER; note = phosphorothioate linkage
  modified_base 2: mod_base = OTHER; note = 2'-fluorocytidine
  modified_base 2^3: mod_base = OTHER; note = phosphorothioate linkage
  modified_base 3: mod_base = cm
  modified_base 3^4: mod_base = OTHER; note = phosphorothioate linkage
  modified_base 4: mod_base = OTHER; note = 2'-fluorouridine
  modified_base 5: mod_base = um
  modified_base 6: mod_base = OTHER; note = 2'-fluorouridine
  modified_base 7: mod_base = OTHER; note = 2'-O-methyladenosine
  modified_base 8: mod_base = OTHER; note = 2'-O-methyladenosine
  modified_base 9: mod_base = OTHER; note = 2'-O-methyladenosine
  modified_base 10: mod_base = gm
  modified_base 11: mod_base = gm
  modified_base 12: mod_base = OTHER; note = 2'-fluorouridine
  modified_base 13: mod_base = um
  modified_base 14: mod_base = OTHER; note = 2'-fluorouridine
  modified_base 15: mod_base = um
  modified_base 16: mod_base = OTHER; note = 2'-fluorocytidine
  modified_base 17: mod_base = OTHER; note = 2'-O-methyladenosine
  modified_base 18: mod_base = OTHER; note = 2'-fluoroguanosine
  modified_base 19: mod_base = um
  modified_base 20: mod_base = OTHER; note = 2'-O-methyladenosine
  modified_base 20^21: mod_base = OTHER; note = phosphorothioate linkage
  modified_base 21: mod_base = gm
  source 1..21: mol_type = other RNA
tcctttaaaggttttcagtag

SEQ ID NO: 1201 - RNA, 21 nt, synthetic construct
  modified_base 1: mod_base = um
  modified_base 1^2: mod_base = OTHER; note = phosphorothioate linkage
  modified_base 2: mod_base = OTHER; note = 2'-fluorocytidine
  modified_base 2^3: mod_base = OTHER; note = phosphorothioate linkage
  modified_base 3: mod_base = cm
  modified_base 3^4: mod_base = OTHER; note = phosphorothioate linkage
  modified_base 4: mod_base = OTHER; note = 2'-fluorouridine
  modified_base 5: mod_base = um
  modified_base 6: mod_base = um
  modified_base 7: mod_base = OTHER; note = 2'-O-methyladenosine
  modified_base 8: mod_base = OTHER; note = 2'-O-methyladenosine
  modified_base 9: mod_base = OTHER; note = 2'-O-methyladenosine
  modified_base 10: mod_base = gm
  modified_base 11: mod_base = gm
  modified_base 12: mod_base = OTHER; note = 2'-fluorouridine
  modified_base 13: mod_base = um
  modified_base 14: mod_base = OTHER; note = 2'-fluorouridine
  modified_base 15: mod_base = um
  modified_base 16: mod_base = OTHER; note = 2'-fluorocytidine
  modified_base 17: mod_base = OTHER; note = 2'-O-methyladenosine
  modified_base 18: mod_base = gm
  modified_base 19: mod_base = um
  modified_base 20: mod_base = OTHER; note = 2'-O-methyladenosine
  modified_base 20^21: mod_base = OTHER; note = phosphorothioate linkage
  modified_base 21: mod_base = gm
  source 1..21: mol_type = other RNA
tcctttaaaggttttcagtag

SEQ ID NO: 1202 - RNA, 21 nt, synthetic construct
  modified_base 1: mod_base = OTHER; note = 5'-cyclopropyl phosphonate-2'-O-methyluridine
  modified_base 1^2: mod_base = OTHER; note = phosphorothioate linkage
  modified_base 2: mod_base = OTHER; note = 2'-fluorocytidine
  modified_base 2^3: mod_base = OTHER; note = phosphorothioate linkage
  modified_base 3: mod_base = cm
  modified_base 3^4: mod_base = OTHER; note = phosphorothioate linkage
  modified_base 4: mod_base = OTHER; note = 2'-fluorouridine
  modified_base 5: mod_base = um
  modified_base 6: mod_base = um
  modified_base 7: mod_base = OTHER; note = 2'-O-methyladenosine
  modified_base 8: mod_base = OTHER; note = 2'-O-methyladenosine
  modified_base 9: mod_base = OTHER; note = 2'-O-methyladenosine
  modified_base 10: mod_base = gm
  modified_base 11: mod_base = gm
  modified_base 12: mod_base = OTHER; note = 2'-fluorouridine
  modified_base 13: mod_base = um
  modified_base 14: mod_base = OTHER; note = 2'-fluorouridine
  modified_base 15: mod_base = um
  modified_base 16: mod_base = OTHER; note = 2'-fluorocytidine
  modified_base 17: mod_base = OTHER; note = 2'-O-methyladenosine
  modified_base 18: mod_base = gm
  modified_base 19: mod_base = um
  modified_base 20: mod_base = OTHER; note = 2'-O-methyladenosine
  modified_base 20^21: mod_base = OTHER; note = phosphorothioate linkage
  modified_base 21: mod_base = gm
  source 1..21: mol_type = other RNA
tcctttaaaggttttcagtag

SEQ ID NO: 1203 - RNA, 21 nt, synthetic construct
  modified_base 1: mod_base = um
  modified_base 1^2: mod_base = OTHER; note = phosphorothioate linkage
  modified_base 2: mod_base = OTHER; note = 2'-fluorocytidine
  modified_base 2^3: mod_base = OTHER; note = phosphorothioate linkage
  modified_base 3: mod_base = cm
  modified_base 3^4: mod_base = OTHER; note = phosphorothioate linkage
  modified_base 4: mod_base = um
  modified_base 5: mod_base = um
  modified_base 6: mod_base = um
  modified_base 7: mod_base = OTHER; note = 2'-fluoroadenosine
  modified_base 8: mod_base = OTHER; note = 2'-O-methyladenosine
  modified_base 9: mod_base = OTHER; note = 2'-O-methyladenosine
  modified_base 10: mod_base = gm
  modified_base 11: mod_base = gm
  modified_base 12: mod_base = OTHER; note = 2'-fluorouridine
  modified_base 13: mod_base = um
  modified_base 14: mod_base = OTHER; note = 2'-fluorouridine
  modified_base 15: mod_base = um
  modified_base 16: mod_base = OTHER; note = 2'-fluorocytidine
  modified_base 17: mod_base = OTHER; note = 2'-O-methyladenosine
  modified_base 18: mod_base = gm
  modified_base 19: mod_base = um
  modified_base 20: mod_base = OTHER; note = 2'-O-methyladenosine
  modified_base 20^21: mod_base = OTHER; note = phosphorothioate linkage
  modified_base 21: mod_base = gm
  source 1..21: mol_type = other RNA
tcctttaaaggttttcagtag

SEQ ID NO: 1204 - RNA, 21 nt, synthetic construct
  modified_base 1: mod_base = um
  modified_base 1^2: mod_base = OTHER; note = phosphorothioate linkage
  modified_base 2: mod_base = OTHER; note = 2'-fluoroadenosine
  modified_base 2^3: mod_base = OTHER; note = phosphorothioate linkage
  modified_base 3: mod_base = gm
  modified_base 3^4: mod_base = OTHER; note = phosphorothioate linkage
  modified_base 4: mod_base = OTHER; note = 2'-fluoroguanosine
  modified_base 5: mod_base = um
  modified_base 6: mod_base = OTHER; note = 2'-O-methyladenosine
  modified_base 7: mod_base = cm
  modified_base 8: mod_base = OTHER; note = 2'-O-methyladenosine
  modified_base 9: mod_base = cm
  modified_base 10: mod_base = OTHER; note = 2'-O-methyladenosine
  modified_base 11: mod_base = gm
  modified_base 12: mod_base = OTHER; note = 2'-fluoroguanosine
  modified_base 13: mod_base = gm
  modified_base 14: mod_base = OTHER; note = 2'-fluorouridine
  modified_base 15: mod_base = cm
  modified_base 16: mod_base = OTHER; note = 2'-fluorouridine
  modified_base 17: mod_base = cm
  modified_base 18: mod_base = cm
  modified_base 19: mod_base = cm
  modified_base 20: mod_base = OTHER; note = 2'-O-methyladenosine
  modified_base 20^21: mod_base = OTHER; note = phosphorothioate linkage
  modified_base 21: mod_base = cm
  source 1..21: mol_type = other RNA
taggtacacagggtctcccac

SEQ ID NO: 1205 - RNA, 21 nt, synthetic construct
  modified_base 1: mod_base = um
  modified_base 1^2: mod_base = OTHER; note = phosphorothioate linkage
  modified_base 2: mod_base = OTHER; note = 2'-fluoroadenosine
  modified_base 2^3: mod_base = OTHER; note = phosphorothioate linkage
  modified_base 3: mod_base = gm
  modified_base 3^4: mod_base = OTHER; note = phosphorothioate linkage
  modified_base 4: mod_base = gm
  modified_base 5: mod_base = um
  modified_base 6: mod_base = OTHER; note = 2'-fluoroadenosine
  modified_base 7: mod_base = cm
  modified_base 8: mod_base = OTHER; note = 2'-O-methyladenosine
  modified_base 9: mod_base = cm
  modified_base 10: mod_base = OTHER; note = 2'-O-methyladenosine
  modified_base 11: mod_base = gm
  modified_base 12: mod_base = OTHER; note = 2'-fluoroguanosine
  modified_base 13: mod_base = gm
  modified_base 14: mod_base = OTHER; note = 2'-fluorouridine
  modified_base 15: mod_base = cm
  modified_base 16: mod_base = OTHER; note = 2'-fluorouridine
  modified_base 17: mod_base = cm
  modified_base 18: mod_base = cm
  modified_base 19: mod_base = cm
  modified_base 20: mod_base = OTHER; note = 2'-O-methyladenosine
  modified_base 20^21: mod_base = OTHER; note = phosphorothioate linkage
  modified_base 21: mod_base = cm
  source 1..21: mol_type = other RNA
taggtacacagggtctcccac

SEQ ID NO: 1206 - RNA, 21 nt, synthetic construct
  modified_base 1: mod_base = um
  modified_base 1^2: mod_base = OTHER; note = phosphorothioate linkage
  modified_base 2: mod_base = OTHER; note = 2'-fluoroadenosine
  modified_base 2^3: mod_base = OTHER; note = phosphorothioate linkage
  modified_base 3: mod_base = gm
  modified_base 3^4: mod_base = OTHER; note = phosphorothioate linkage
  modified_base 4: mod_base = gm
  modified_base 5: mod_base = um
  modified_base 6: mod_base = OTHER; note = 2'-O-methyladenosine
  modified_base 7: mod_base = OTHER; note = 2'-fluorocytidine
  modified_base 8: mod_base = OTHER; note = 2'-O-methyladenosine
  modified_base 9: mod_base = cm
  modified_base 10: mod_base = OTHER; note = 2'-O-methyladenosine
  modified_base 11: mod_base = gm
  modified_base 12: mod_base = OTHER; note = 2'-fluoroguanosine
  modified_base 13: mod_base = gm
  modified_base 14: mod_base = OTHER; note = 2'-fluorouridine
  modified_base 15: mod_base = cm
  modified_base 16: mod_base = OTHER; note = 2'-fluorouridine
  modified_base 17: mod_base = cm
  modified_base 18: mod_base = cm
  modified_base 19: mod_base = cm
  modified_base 20: mod_base = OTHER; note = 2'-O-methyladenosine
  modified_base 20^21: mod_base = OTHER; note = phosphorothioate linkage
  modified_base 21: mod_base = cm
  source 1..21: mol_type = other RNA
taggtacacagggtctcccac

SEQ ID NO: 1207 - RNA, 21 nt, synthetic construct
  modified_base 1: mod_base = OTHER; note = 5'-cyclopropyl phosphonate-2'-O-methyluridine
  modified_base 1^2: mod_base = OTHER; note = phosphorothioate linkage
  modified_base 2: mod_base = OTHER; note = 2'-fluoroadenosine
  modified_base 2^3: mod_base = OTHER; note = phosphorothioate linkage
  modified_base 3: mod_base = gm
  modified_base 3^4: mod_base = OTHER; note = phosphorothioate linkage
  modified_base 4: mod_base = gm
  modified_base 5: mod_base = um
  modified_base 6: mod_base = OTHER; note = 2'-O-methyladenosine
  modified_base 7: mod_base = OTHER; note = 2'-fluorocytidine
  modified_base 8: mod_base = OTHER; note = 2'-O-methyladenosine
  modified_base 9: mod_base = cm
  modified_base 10: mod_base = OTHER; note = 2'-O-methyladenosine
  modified_base 11: mod_base = gm
  modified_base 12: mod_base = OTHER; note = 2'-fluoroguanosine
  modified_base 13: mod_base = gm
  modified_base 14: mod_base = OTHER; note = 2'-fluorouridine
  modified_base 15: mod_base = cm
  modified_base 16: mod_base = OTHER; note = 2'-fluorouridine
  modified_base 17: mod_base = cm
  modified_base 18: mod_base = cm
  modified_base 19: mod_base = cm
  modified_base 20: mod_base = OTHER; note = 2'-O-methyladenosine
  modified_base 20^21: mod_base = OTHER; note = phosphorothioate linkage
  modified_base 21: mod_base = cm
  source 1..21: mol_type = other RNA
taggtacacagggtctcccac

SEQ ID NO: 1208 - RNA, 21 nt, synthetic construct
  modified_base 1: mod_base = um
  modified_base 1^2: mod_base = OTHER; note = phosphorothioate linkage
  modified_base 2: mod_base = OTHER; note = 2'-fluoroadenosine
  modified_base 2^3: mod_base = OTHER; note = phosphorothioate linkage
  modified_base 3: mod_base = gm
  modified_base 3^4: mod_base = OTHER; note = phosphorothioate linkage
  modified_base 4: mod_base = gm
  modified_base 5: mod_base = um
  modified_base 6: mod_base = OTHER; note = 2'-O-methyladenosine
  modified_base 7: mod_base = OTHER; note = 2'-fluorocytidine
  modified_base 8: mod_base = OTHER; note = 2'-O-methyladenosine
  modified_base 9: mod_base = cm
  modified_base 10: mod_base = OTHER; note = 2'-O-methyladenosine
  modified_base 11: mod_base = gm
  modified_base 12: mod_base = OTHER; note = 2'-fluoroguanosine
  modified_base 13: mod_base = gm
  modified_base 14: mod_base = OTHER; note = 2'-fluorouridine
  modified_base 15: mod_base = cm
  modified_base 16: mod_base = OTHER; note = 2'-fluorouridine
  modified_base 17: mod_base = cm
  modified_base 18: mod_base = cm
  modified_base 19: mod_base = cm
  modified_base 20: mod_base = OTHER; note = 2'-O-methyladenosine
  modified_base 20^21: mod_base = OTHER; note = phosphorothioate linkage
  modified_base 21: mod_base = um
  source 1..21: mol_type = other RNA
taggtacacagggtctcccat

SEQ ID NO: 1209 - RNA, 21 nt, synthetic construct
  modified_base 1: mod_base = um
  modified_base 1^2: mod_base = OTHER; note = phosphorothioate linkage
  modified_base 2: mod_base = OTHER; note = 2'-fluoroadenosine
  modified_base 2^3: mod_base = OTHER; note = phosphorothioate linkage
  modified_base 3: mod_base = gm
  modified_base 3^4: mod_base = OTHER; note = phosphorothioate linkage
  modified_base 4: mod_base = gm
  modified_base 5: mod_base = um
  modified_base 6: mod_base = OTHER; note = 2'-O-methyladenosine
  modified_base 7: mod_base = OTHER; note = 2'-fluorocytidine
  modified_base 8: mod_base = OTHER; note = 2'-O-methyladenosine
  modified_base 9: mod_base = cm
  modified_base 10: mod_base = OTHER; note = 2'-O-methyladenosine
  modified_base 11: mod_base = gm
  modified_base 12: mod_base = OTHER; note = 2'-fluoroguanosine
  modified_base 13: mod_base = gm
  modified_base 14: mod_base = OTHER; note = 2'-fluorouridine
  modified_base 15: mod_base = cm
  modified_base 16: mod_base = OTHER; note = 2'-fluorouridine
  modified_base 17: mod_base = cm
  modified_base 18: mod_base = cm
  modified_base 19: mod_base = um
  modified_base 20: mod_base = OTHER; note = 2'-O-methyladenosine
  modified_base 20^21: mod_base = OTHER; note = phosphorothioate linkage
  modified_base 21: mod_base = cm
  source 1..21: mol_type = other RNA
taggtacacagggtctcctac

SEQ ID NO: 1210 - RNA, 21 nt, synthetic construct
  modified_base 1: mod_base = OTHER; note = 5'-cyclopropyl phosphonate-2'-O-methyluridine
  modified_base 1^2: mod_base = OTHER; note = phosphorothioate linkage
  modified_base 2: mod_base = OTHER; note = 2'-fluorocytidine
  modified_base 3: mod_base = OTHER; note = 2'-O-methyladenosine
  modified_base 4: mod_base = OTHER; note = 2'-fluoroguanosine
  modified_base 5: mod_base = OTHER; note = 2'-O-methyladenosine
  modified_base 6: mod_base = OTHER; note = 2'-O-methyladenosine
  modified_base 7: mod_base = um
  modified_base 8: mod_base = cm
  modified_base 9: mod_base = cm
  modified_base 10: mod_base = um
  modified_base 11: mod_base = gm
  modified_base 12: mod_base = OTHER; note = 2'-fluorouridine
  modified_base 13: mod_base = cm
  modified_base 14: mod_base = OTHER; note = 2'-fluorouridine
  modified_base 15: mod_base = um
  modified_base 16: mod_base = OTHER; note = 2'-fluoroguanosine
  modified_base 17: mod_base = um
  modified_base 18: mod_base = cm
  modified_base 19: mod_base = OTHER; note = 2'-O-methyladenosine
  modified_base 20: mod_base = um
  modified_base 20^21: mod_base = OTHER; note = phosphorothioate linkage
  modified_base 21: mod_base = um
  source 1..21: mol_type = other RNA
tcagaatcctgtcttgtcatt

SEQ ID NO: 1211 - RNA, 21 nt, synthetic construct
  modified_base 1: mod_base = OTHER; note = 5'-cyclopropyl phosphonate-2'-O-methyluridine
  modified_base 1^2: mod_base = OTHER; note = phosphorothioate linkage
  modified_base 2: mod_base = OTHER; note = 2'-fluorocytidine
  modified_base 3: mod_base = OTHER; note = 2'-O-methyladenosine
  modified_base 4: mod_base = gm
  modified_base 5: mod_base = OTHER; note = 2'-fluoroadenosine
  modified_base 6: mod_base = OTHER; note = 2'-O-methyladenosine
  modified_base 7: mod_base = um
  modified_base 8: mod_base = cm
  modified_base 9: mod_base = cm
  modified_base 10: mod_base = um
  modified_base 11: mod_base = gm
  modified_base 12: mod_base = OTHER; note = 2'-fluorouridine
  modified_base 13: mod_base = cm
  modified_base 14: mod_base = OTHER; note = 2'-fluorouridine
  modified_base 15: mod_base = um
  modified_base 16: mod_base = OTHER; note = 2'-fluoroguanosine
  modified_base 17: mod_base = um
  modified_base 18: mod_base = cm
  modified_base 19: mod_base = OTHER; note = 2'-O-methyladenosine
  modified_base 20: mod_base = um
  modified_base 20^21: mod_base = OTHER; note = phosphorothioate linkage
  modified_base 21: mod_base = um
  source 1..21: mol_type = other RNA
tcagaatcctgtcttgtcatt

SEQ ID NO: 1212 - RNA, 21 nt, synthetic construct
  modified_base 1: mod_base = OTHER; note = 5'-cyclopropyl phosphonate-2'-O-methyluridine
  modified_base 1^2: mod_base = OTHER; note = phosphorothioate linkage
  modified_base 2: mod_base = OTHER; note = 2'-fluorocytidine
  modified_base 3: mod_base = OTHER; note = 2'-O-methyladenosine
  modified_base 4: mod_base = gm
  modified_base 5: mod_base = OTHER; note = 2'-O-methyladenosine
  modified_base 6: mod_base = OTHER; note = 2'-O-methyladenosine
  modified_base 7: mod_base = OTHER; note = 2'-fluorouridine
  modified_base 8: mod_base = cm
  modified_base 9: mod_base = cm
  modified_base 10: mod_base = um
  modified_base 11: mod_base = gm
  modified_base 12: mod_base = OTHER; note = 2'-fluorouridine
  modified_base 13: mod_base = cm
  modified_base 14: mod_base = OTHER; note = 2'-fluorouridine
  modified_base 15: mod_base = um
  modified_base 16: mod_base = OTHER; note = 2'-fluoroguanosine
  modified_base 17: mod_base = um
  modified_base 18: mod_base = cm
  modified_base 19: mod_base = OTHER; note = 2'-O-methyladenosine
  modified_base 20: mod_base = um
  modified_base 20^21: mod_base = OTHER; note = phosphorothioate linkage
  modified_base 21: mod_base = um
  source 1..21: mol_type = other RNA
tcagaatcctgtcttgtcatt

SEQ ID NO: 1213 - RNA, 21 nt, synthetic construct
  modified_base 1: mod_base = OTHER; note = 5'-cyclopropyl phosphonate-2'-O-methyladenosine
  modified_base 1^2: mod_base = OTHER; note = phosphorothioate linkage
  modified_base 2: mod_base = OTHER; note = 2'-fluorocytidine
  modified_base 3: mod_base = OTHER; note = 2'-O-methyladenosine
  modified_base 4: mod_base = gm
  modified_base 5: mod_base = OTHER; note = 2'-O-methyladenosine
  modified_base 6: mod_base = OTHER; note = 2'-O-methyladenosine
  modified_base 7: mod_base = um
  modified_base 8: mod_base = cm
  modified_base 9: mod_base = cm
  modified_base 10: mod_base = um
  modified_base 11: mod_base = gm
  modified_base 12: mod_base = OTHER; note = 2'-fluorouridine
  modified_base 13: mod_base = cm
  modified_base 14: mod_base = OTHER; note = 2'-fluorouridine
  modified_base 15: mod_base = um
  modified_base 16: mod_base = OTHER; note = 2'-fluoroguanosine
  modified_base 17: mod_base = um
  modified_base 18: mod_base = cm
  modified_base 19: mod_base = OTHER; note = 2'-O-methyladenosine
  modified_base 20: mod_base = um
  modified_base 20^21: mod_base = OTHER; note = phosphorothioate linkage
  modified_base 21: mod_base = um
  source 1..21: mol_type = other RNA
acagaatcctgtcttgtcatt

SEQ ID NO: 1214 - RNA, 21 nt, synthetic construct
  modified_base 1: mod_base = OTHER; note = 2'-O-methyladenosine
  modified_base 1^2: mod_base = OTHER; note = phosphorothioate linkage
  modified_base 2: mod_base = OTHER; note = 2'-fluorocytidine
  modified_base 3: mod_base = OTHER; note = 2'-O-methyladenosine
  modified_base 4: mod_base = gm
  modified_base 5: mod_base = OTHER; note = 2'-O-methyladenosine
  modified_base 6: mod_base = OTHER; note = 2'-O-methyladenosine
  modified_base 7: mod_base = um
  modified_base 8: mod_base = cm
  modified_base 9: mod_base = cm
  modified_base 10: mod_base = um
  modified_base 11: mod_base = gm
  modified_base 12: mod_base = OTHER; note = 2'-fluorouridine
  modified_base 13: mod_base = cm
  modified_base 14: mod_base = OTHER; note = 2'-fluorouridine
  modified_base 15: mod_base = um
  modified_base 16: mod_base = OTHER; note = 2'-fluoroguanosine
  modified_base 17: mod_base = um
  modified_base 18: mod_base = cm
  modified_base 19: mod_base = OTHER; note = 2'-O-methyladenosine
  modified_base 20: mod_base = um
  modified_base 20^21: mod_base = OTHER; note = phosphorothioate linkage
  modified_base 21: mod_base = um
  source 1..21: mol_type = other RNA
acagaatcctgtcttgtcatt

SEQ ID NO: 1215 - RNA, 21 nt, synthetic construct
  modified_base 1: mod_base = OTHER; note = 5'-cyclopropyl phosphonate-2'-O-methyluridine
  modified_base 1^2: mod_base = OTHER; note = phosphorothioate linkage
  modified_base 2: mod_base = OTHER; note = 2'-fluorocytidine
  modified_base 3: mod_base = OTHER; note = 2'-O-methyladenosine
  modified_base 4: mod_base = gm
  modified_base 5: mod_base = OTHER; note = 2'-O-methyladenosine
  modified_base 6: mod_base = OTHER; note = 2'-O-methyladenosine
  modified_base 7: mod_base = um
  modified_base 8: mod_base = cm
  modified_base 9: mod_base = cm
  modified_base 10: mod_base = um
  modified_base 11: mod_base = gm
  modified_base 12: mod_base = OTHER; note = 2'-fluorouridine
  modified_base 13: mod_base = cm
  modified_base 14: mod_base = OTHER; note = 2'-fluorouridine
  modified_base 15: mod_base = um
  modified_base 16: mod_base = OTHER; note = 2'-fluoroguanosine
  modified_base 17: mod_base = um
  modified_base 18: mod_base = cm
  modified_base 19: mod_base = gm
  modified_base 20: mod_base = um
  modified_base 20^21: mod_base = OTHER; note = phosphorothioate linkage
  modified_base 21: mod_base = um
  source 1..21: mol_type = other RNA
tcagaatcctgtcttgtcgtt

SEQ ID NO: 1216 - RNA, 21 nt, synthetic construct
  modified_base 1: mod_base = OTHER; note = 5'-cyclopropyl phosphonate-2'-O-methyluridine
  modified_base 1^2: mod_base = OTHER; note = phosphorothioate linkage
  modified_base 2: mod_base = OTHER; note = 2'-fluorocytidine
  modified_base 3: mod_base = OTHER; note = 2'-O-methyladenosine
  modified_base 4: mod_base = gm
  modified_base 5: mod_base = OTHER; note = 2'-O-methyladenosine
  modified_base 6: mod_base = OTHER; note = 2'-O-methyladenosine
  modified_base 7: mod_base = um
  modified_base 8: mod_base = cm
  modified_base 9: mod_base = cm
  modified_base 10: mod_base = um
  modified_base 11: mod_base = gm
  modified_base 12: mod_base = OTHER; note = 2'-fluorouridine
  modified_base 13: mod_base = cm
  modified_base 14: mod_base = OTHER; note = 2'-fluorouridine
  modified_base 15: mod_base = um
  modified_base 16: mod_base = OTHER; note = 2'-fluoroguanosine
  modified_base 17: mod_base = um
  modified_base 18: mod_base = cm
  modified_base 19: mod_base = OTHER; note = 2'-O-methyladenosine
  modified_base 20: mod_base = um
  modified_base 20^21: mod_base = OTHER; note = phosphorothioate linkage
  modified_base 21: mod_base = cm
  source 1..21: mol_type = other RNA
tcagaatcctgtcttgtcatc

SEQ ID NO: 1217 - RNA, 21 nt, synthetic construct
  modified_base 1: mod_base = OTHER; note = 5'-cyclopropyl phosphonate-2'-O-methyladenosine
  modified_base 1^2: mod_base = OTHER; note = phosphorothioate linkage
  modified_base 2: mod_base = OTHER; note = 2'-fluorocytidine
  modified_base 3: mod_base = OTHER; note = 2'-O-methyladenosine
  modified_base 4: mod_base = OTHER; note = 2'-fluoroguanosine
  modified_base 5: mod_base = OTHER; note = 2'-O-methyladenosine
  modified_base 6: mod_base = OTHER; note = 2'-O-methyladenosine
  modified_base 7: mod_base = um
  modified_base 8: mod_base = cm
  modified_base 9: mod_base = cm
  modified_base 10: mod_base = um
  modified_base 11: mod_base = gm
  modified_base 12: mod_base = OTHER; note = 2'-fluorouridine
  modified_base 13: mod_base = cm
  modified_base 14: mod_base = OTHER; note = 2'-fluorouridine
  modified_base 15: mod_base = um
  modified_base 16: mod_base = OTHER; note = 2'-fluoroguanosine
  modified_base 17: mod_base = um
  modified_base 18: mod_base = cm
  modified_base 19: mod_base = OTHER; note = 2'-O-methyladenosine
  modified_base 20: mod_base = um
  modified_base 20^21: mod_base = OTHER; note = phosphorothioate linkage
  modified_base 21: mod_base = cm
  source 1..21: mol_type = other RNA
acagaatcctgtcttgtcatc

SEQ ID NO: 1218 - RNA, 21 nt, synthetic construct
  modified_base 1: mod_base = OTHER; note = 2'-O-methyladenosine
  modified_base 1^2: mod_base = OTHER; note = phosphorothioate linkage
  modified_base 2: mod_base = OTHER; note = 2'-fluoroguanosine
  modified_base 2^3: mod_base = OTHER; note = phosphorothioate linkage
  modified_base 3: mod_base = gm
  modified_base 3^4: mod_base = OTHER; note = phosphorothioate linkage
  modified_base 4: mod_base = OTHER; note = 2'-fluorocytidine
  modified_base 5: mod_base = OTHER; note = 2'-O-methyladenosine
  modified_base 6: mod_base = OTHER; note = 2'-fluorouridine
  modified_base 7: mod_base = cm
  modified_base 8: mod_base = um
  modified_base 9: mod_base = OTHER; note = 2'-O-methyladenosine
  modified_base 10: mod_base = OTHER; note = 2'-O-methyladenosine
  modified_base 11: mod_base = um
  modified_base 12: mod_base = OTHER; note = 2'-fluoroadenosine
  modified_base 13: mod_base = um
  modified_base 14: mod_base = OTHER; note = 2'-fluorouridine
  modified_base 15: mod_base = cm
  modified_base 16: mod_base = OTHER; note = 2'-fluorocytidine
  modified_base 17: mod_base = OTHER; note = 2'-O-methyladenosine
  modified_base 18: mod_base = OTHER; note = 2'-fluoroguanosine
  modified_base 19: mod_base = gm
  modified_base 20: mod_base = OTHER; note = 2'-O-methyladenosine
  modified_base 20^21: mod_base = OTHER; note = phosphorothioate linkage
  modified_base 21: mod_base = cm
  source 1..21: mol_type = other RNA
aggcatctaatattccaggac

SEQ ID NO: 1219 - RNA, 21 nt, synthetic construct
  modified_base 1: mod_base = OTHER; note = 2'-O-methyladenosine
  modified_base 1^2: mod_base = OTHER; note = phosphorothioate linkage
  modified_base 2: mod_base = OTHER; note = 2'-fluoroguanosine
  modified_base 2^3: mod_base = OTHER; note = phosphorothioate linkage
  modified_base 3: mod_base = cm
  modified_base 3^4: mod_base = OTHER; note = phosphorothioate linkage
  modified_base 4: mod_base = OTHER; note = 2'-fluoroadenosine
  modified_base 5: mod_base = um
  modified_base 6: mod_base = OTHER; note = 2'-fluorocytidine
  modified_base 7: mod_base = um
  modified_base 8: mod_base = OTHER; note = 2'-O-methyladenosine
  modified_base 9: mod_base = OTHER; note = 2'-O-methyladenosine
  modified_base 10: mod_base = um
  modified_base 11: mod_base = OTHER; note = 2'-O-methyladenosine
  modified_base 12: mod_base = OTHER; note = 2'-fluorouridine
  modified_base 13: mod_base = um
  modified_base 14: mod_base = OTHER; note = 2'-fluorocytidine
  modified_base 15: mod_base = cm
  modified_base 16: mod_base = OTHER; note = 2'-fluoroadenosine
  modified_base 17: mod_base = gm
  modified_base 18: mod_base = OTHER; note = 2'-fluoroguanosine
  modified_base 19: mod_base = OTHER; note = 2'-O-methyladenosine
  modified_base 20: mod_base = cm
  modified_base 20^21: mod_base = OTHER; note = phosphorothioate linkage
  modified_base 21: mod_base = OTHER; note = 2'-O-methyladenosine
  source 1..21: mol_type = other RNA
agcatctaatattccaggaca

SEQ ID NO: 1220 - RNA, 21 nt, synthetic construct
  modified_base 1: mod_base = OTHER; note = 2'-O-methyladenosine
  modified_base 1^2: mod_base = OTHER; note = phosphorothioate linkage
  modified_base 2: mod_base = OTHER; note = 2'-fluoroadenosine
  modified_base 2^3: mod_base = OTHER; note = phosphorothioate linkage
  modified_base 3: mod_base = gm
  modified_base 3^4: mod_base = OTHER; note = phosphorothioate linkage
  modified_base 4: mod_base = OTHER; note = 2'-fluoroguanosine
  modified_base 5: mod_base = cm
  modified_base 6: mod_base = OTHER; note = 2'-fluoroadenosine
  modified_base 7: mod_base = um
  modified_base 8: mod_base = cm
  modified_base 9: mod_base = um
  modified_base 10: mod_base = OTHER; note = 2'-O-methyladenosine
  modified_base 11: mod_base = OTHER; note = 2'-O-methyladenosine
  modified_base 12: mod_base = OTHER; note = 2'-fluorouridine
  modified_base 13: mod_base = OTHER; note = 2'-O-methyladenosine
  modified_base 14: mod_base = OTHER; note = 2'-fluorouridine
  modified_base 15: mod_base = um
  modified_base 16: mod_base = OTHER; note = 2'-fluorocytidine
  modified_base 17: mod_base = cm
  modified_base 18: mod_base = OTHER; note = 2'-fluoroadenosine
  modified_base 19: mod_base = gm
  modified_base 20: mod_base = gm
  modified_base 20^21: mod_base = OTHER; note = phosphorothioate linkage
  modified_base 21: mod_base = OTHER; note = 2'-O-methyladenosine
  source 1..21: mol_type = other RNA
aaggcatctaatattccagga

SEQ ID NO: 1221 - RNA, 21 nt, synthetic construct
  modified_base 1: mod_base = OTHER; note = 5'-cyclopropyl phosphonate-2'-O-methyluridine
  modified_base 1^2: mod_base = OTHER; note = phosphorothioate linkage
  modified_base 2: mod_base = OTHER; note = 2'-fluoroguanosine
  modified_base 3: mod_base = um
  modified_base 4: mod_base = gm
  modified_base 5: mod_base = um
  modified_base 6: mod_base = um
  modified_base 7: mod_base = OTHER; note = 2'-fluoroguanosine
  modified_base 8: mod_base = um
  modified_base 9: mod_base = cm
  modified_base 10: mod_base = OTHER; note = 2'-O-methyladenosine
  modified_base 11: mod_base = um
  modified_base 12: mod_base = OTHER; note = 2'-fluorouridine
  modified_base 13: mod_base = um
  modified_base 14: mod_base = OTHER; note = 2'-fluorouridine
  modified_base 15: mod_base = um
  modified_base 16: mod_base = OTHER; note = 2'-fluoroguanosine
  modified_base 17: mod_base = OTHER; note = 2'-O-methyladenosine
  modified_base 18: mod_base = gm
  modified_base 19: mod_base = OTHER; note = 2'-O-methyladenosine
  modified_base 20: mod_base = OTHER; note = 2'-O-methyladenosine
  modified_base 20^21: mod_base = OTHER; note = phosphorothioate linkage
  modified_base 21: mod_base = cm
  source 1..21: mol_type = other RNA
tgtgttgtcatttttgagaac

SEQ ID NO: 1222 - RNA, 21 nt, synthetic construct
  modified_base 1: mod_base = OTHER; note = 5'-cyclopropyl phosphonate-2'-O-methyluridine
  modified_base 1^2: mod_base = OTHER; note = phosphorothioate linkage
  modified_base 2: mod_base = OTHER; note = 2'-fluoroguanosine
  modified_base 3: mod_base = um
  modified_base 4: mod_base = OTHER; note = 2'-fluoroguanosine
  modified_base 5: mod_base = um
  modified_base 6: mod_base = um
  modified_base 7: mod_base = gm
  modified_base 8: mod_base = um
  modified_base 9: mod_base = cm
  modified_base 10: mod_base = OTHER; note = 2'-O-methyladenosine
  modified_base 11: mod_base = um
  modified_base 12: mod_base = OTHER; note = 2'-fluorouridine
  modified_base 13: mod_base = um
  modified_base 14: mod_base = OTHER; note = 2'-fluorouridine
  modified_base 15: mod_base = um
  modified_base 16: mod_base = OTHER; note = 2'-fluoroguanosine
  modified_base 17: mod_base = OTHER; note = 2'-O-methyladenosine
  modified_base 18: mod_base = gm
  modified_base 19: mod_base = OTHER; note = 2'-O-methyladenosine
  modified_base 20: mod_base = OTHER; note = 2'-O-methyladenosine
  modified_base 20^21: mod_base = OTHER; note = phosphorothioate linkage
  modified_base 21: mod_base = cm
  source 1..21: mol_type = other RNA
tgtgttgtcatttttgagaac

SEQ ID NO: 1223 - RNA, 21 nt, synthetic construct
  modified_base 1: mod_base = um
  modified_base 1^2: mod_base = OTHER; note = phosphorothioate linkage
  modified_base 2: mod_base = OTHER; note = 2'-fluoroadenosine
  modified_base 2^3: mod_base = OTHER; note = phosphorothioate linkage
  modified_base 3: mod_base = OTHER; note = 2'-O-methyladenosine
  modified_base 3^4: mod_base = OTHER; note = phosphorothioate linkage
  modified_base 4: mod_base = um
  modified_base 5: mod_base = cm
  modified_base 6: mod_base = OTHER; note = 2'-O-methyladenosine
  modified_base 7: mod_base = OTHER; note = 2'-fluoroadenosine
  modified_base 8: mod_base = OTHER; note = 2'-O-methyladenosine
  modified_base 9: mod_base = gm
  modified_base 10: mod_base = gm
  modified_base 11: mod_base = OTHER; note = 2'-O-methyladenosine
  modified_base 12: mod_base = OTHER; note = 2'-fluorocytidine
  modified_base 13: mod_base = OTHER; note = 2'-O-methyladenosine
  modified_base 14: mod_base = OTHER; note = 2'-fluoroadenosine
  modified_base 15: mod_base = OTHER; note = 2'-O-methyladenosine
  modified_base 16: mod_base = OTHER; note = 2'-fluoroadenosine
  modified_base 17: mod_base = um
  modified_base 18: mod_base = gm
  modified_base 19: mod_base = gm
  modified_base 20: mod_base = cm
  modified_base 20^21: mod_base = OTHER; note = phosphorothioate linkage
  modified_base 21: mod_base = OTHER; note = 2'-O-methyladenosine
  source 1..21: mol_type = other RNA
taatcaaaggacaaaatggca

SEQ ID NO: 1224 - RNA, 21 nt, synthetic construct
  modified_base 1: mod_base = OTHER; note = 5'-cyclopropyl phosphonate-2'-O-methyluridine
  modified_base 1^2: mod_base = OTHER; note = phosphorothioate linkage
  modified_base 2: mod_base = OTHER; note = 2'-fluoroadenosine
  modified_base 3: mod_base = OTHER; note = 2'-O-methyladenosine
  modified_base 4: mod_base = um
  modified_base 5: mod_base = cm
  modified_base 6: mod_base = OTHER; note = 2'-O-methyladenosine
  modified_base 7: mod_base = OTHER; note = 2'-fluoroadenosine
  modified_base 8: mod_base = OTHER; note = 2'-O-methyladenosine
  modified_base 9: mod_base = gm
  modified_base 10: mod_base = gm
  modified_base 11: mod_base = OTHER; note = 2'-O-methyladenosine
  modified_base 12: mod_base = OTHER; note = 2'-fluorocytidine
  modified_base 13: mod_base = OTHER; note = 2'-O-methyladenosine
  modified_base 14: mod_base = OTHER; note = 2'-fluoroadenosine
  modified_base 15: mod_base = OTHER; note = 2'-O-methyladenosine
  modified_base 16: mod_base = OTHER; note = 2'-fluoroadenosine
  modified_base 17: mod_base = um
  modified_base 18: mod_base = gm
  modified_base 19: mod_base = gm
  modified_base 20: mod_base = cm
  modified_base 20^21: mod_base = OTHER; note = phosphorothioate linkage
  modified_base 21: mod_base = OTHER; note = 2'-O-methyladenosine
  source 1..21: mol_type = other RNA
taatcaaaggacaaaatggca

SEQ ID NO: 1225 - RNA, 21 nt, synthetic construct
  modified_base 1: mod_base = um
  modified_base 1^2: mod_base = OTHER; note = phosphorothioate linkage
  modified_base 2: mod_base = OTHER; note = 2'-fluoroadenosine
  modified_base 2^3: mod_base = OTHER; note = phosphorothioate linkage
  modified_base 3: mod_base = OTHER; note = 2'-O-methyladenosine
  modified_base 3^4: mod_base = OTHER; note = phosphorothioate linkage
  modified_base 4: mod_base = OTHER; note = 2'-fluorouridine
  modified_base 5: mod_base = cm
  modified_base 6: mod_base = OTHER; note = 2'-O-methyladenosine
  modified_base 7: mod_base = OTHER; note = 2'-O-methyladenosine
  modified_base 8: mod_base = OTHER; note = 2'-O-methyladenosine
  modified_base 9: mod_base = gm
  modified_base 10: mod_base = gm
  modified_base 11: mod_base = OTHER; note = 2'-O-methyladenosine
  modified_base 12: mod_base = OTHER; note = 2'-fluorocytidine
  modified_base 13: mod_base = OTHER; note = 2'-O-methyladenosine
  modified_base 14: mod_base = OTHER; note = 2'-fluoroadenosine
  modified_base 15: mod_base = OTHER; note = 2'-O-methyladenosine
  modified_base 16: mod_base = OTHER; note = 2'-fluoroadenosine
  modified_base 17: mod_base = um
  modified_base 18: mod_base = gm
  modified_base 19: mod_base = gm
  modified_base 20: mod_base = cm
  modified_base 20^21: mod_base = OTHER; note = phosphorothioate linkage
  modified_base 21: mod_base = OTHER; note = 2'-O-methyladenosine
  source 1..21: mol_type = other RNA
taatcaaaggacaaaatggca

SEQ ID NO: 1226 - RNA, 21 nt, synthetic construct
  modified_base 1: mod_base = OTHER; note = 5'-cyclopropyl phosphonate-2'-O-methyluridine
  modified_base 1^2: mod_base = OTHER; note = phosphorothioate linkage
  modified_base 2: mod_base = OTHER; note = 2'-fluoroadenosine
  modified_base 3: mod_base = OTHER; note = 2'-O-methyladenosine
  modified_base 4: mod_base = OTHER; note = 2'-fluorouridine
  modified_base 5: mod_base = cm
  modified_base 6: mod_base = OTHER; note = 2'-O-methyladenosine
  modified_base 7: mod_base = OTHER; note = 2'-O-methyladenosine
  modified_base 8: mod_base = OTHER; note = 2'-O-methyladenosine
  modified_base 9: mod_base = gm
  modified_base 10: mod_base = gm
  modified_base 11: mod_base = OTHER; note = 2'-O-methyladenosine
  modified_base 12: mod_base = OTHER; note = 2'-fluorocytidine
  modified_base 13: mod_base = OTHER; note = 2'-O-methyladenosine
  modified_base 14: mod_base = OTHER; note = 2'-fluoroadenosine
  modified_base 15: mod_base = OTHER; note = 2'-O-methyladenosine
  modified_base 16: mod_base = OTHER; note = 2'-fluoroadenosine
  modified_base 17: mod_base = um
  modified_base 18: mod_base = gm
  modified_base 19: mod_base = gm
  modified_base 20: mod_base = cm
  modified_base 20^21: mod_base = OTHER; note = phosphorothioate linkage
  modified_base 21: mod_base = OTHER; note = 2'-O-methyladenosine
  source 1..21: mol_type = other RNA
taatcaaaggacaaaatggca

SEQ ID NO: 1227 - RNA, 21 nt, synthetic construct
  modified_base 1: mod_base = OTHER; note = 2'-O-methyladenosine
  modified_base 1^2: mod_base = OTHER; note = phosphorothioate linkage
  modified_base 2: mod_base = OTHER; note = 2'-fluorocytidine
  modified_base 3: mod_base = OTHER; note = 2'-O-methyladenosine
  modified_base 4: mod_base = gm
  modified_base 5: mod_base = OTHER; note = 2'-fluoroadenosine
  modified_base 6: mod_base = OTHER; note = 2'-O-methyladenosine
  modified_base 7: mod_base = um
  modified_base 8: mod_base = cm
  modified_base 9: mod_base = cm
  modified_base 10: mod_base = um
  modified_base 11: mod_base = gm
  modified_base 12: mod_base = OTHER; note = 2'-fluorouridine
  modified_base 13: mod_base = cm
  modified_base 14: mod_base = OTHER; note = 2'-fluorouridine
  modified_base 15: mod_base = um
  modified_base 16: mod_base = OTHER; note = 2'-fluoroguanosine
  modified_base 17: mod_base = um
  modified_base 18: mod_base = cm
  modified_base 19: mod_base = OTHER; note = 2'-O-methyladenosine
  modified_base 20: mod_base = um
  modified_base 20^21: mod_base = OTHER; note = phosphorothioate linkage
  modified_base 21: mod_base = um
  source 1..21: mol_type = other RNA
acagaatcctgtcttgtcatt

SEQ ID NO: 1228 - RNA, 21 nt, synthetic construct
  modified_base 1: mod_base = OTHER; note = 2'-O-methyladenosine
  modified_base 1^2: mod_base = OTHER; note = phosphorothioate linkage
  modified_base 2: mod_base = OTHER; note = 2'-fluorocytidine
  modified_base 3: mod_base = OTHER; note = 2'-O-methyladenosine
  modified_base 4: mod_base = gm
  modified_base 5: mod_base = OTHER; note = 2'-fluoroadenosine
  modified_base 6: mod_base = OTHER; note = 2'-O-methyladenosine
  modified_base 7: mod_base = um
  modified_base 8: mod_base = cm
  modified_base 9: mod_base = cm
  modified_base 10: mod_base = um
  modified_base 11: mod_base = gm
  modified_base 12: mod_base = OTHER; note = 2'-fluorouridine
  modified_base 13: mod_base = cm
  modified_base 14: mod_base = OTHER; note = 2'-fluorouridine
  modified_base 15: mod_base = um
  modified_base 16: mod_base = OTHER; note = 2'-fluoroguanosine
  modified_base 17: mod_base = um
  modified_base 18: mod_base = cm
  modified_base 19: mod_base = gm
  modified_base 20: mod_base = um
  modified_base 20^21: mod_base = OTHER; note = phosphorothioate linkage
  modified_base 21: mod_base = um
  source 1..21: mol_type = other RNA
acagaatcctgtcttgtcgtt

SEQ ID NO: 1229 - RNA, 21 nt, synthetic construct
  modified_base 1: mod_base = OTHER; note = 2'-O-methylinosine
  modified_base 1^2: mod_base = OTHER; note = phosphorothioate linkage
  modified_base 2: mod_base = OTHER; note = 2'-fluorocytidine
  modified_base 3: mod_base = OTHER; note = 2'-O-methyladenosine
  modified_base 4: mod_base = gm
  modified_base 5: mod_base = OTHER; note = 2'-fluoroadenosine
  modified_base 6: mod_base = OTHER; note = 2'-O-methyladenosine
  modified_base 7: mod_base = um
  modified_base 8: mod_base = cm
  modified_base 9: mod_base = cm
  modified_base 10: mod_base = um
  modified_base 11: mod_base = gm
  modified_base 12: mod_base = OTHER; note = 2'-fluorouridine
  modified_base 13: mod_base = cm
  modified_base 14: mod_base = OTHER; note = 2'-fluorouridine
  modified_base 15: mod_base = um
  modified_base 16: mod_base = OTHER; note = 2'-fluoroguanosine
  modified_base 17: mod_base = um
  modified_base 18: mod_base = cm
  modified_base 19: mod_base = gm
  modified_base 20: mod_base = um
  modified_base 20^21: mod_base = OTHER; note = phosphorothioate linkage
  modified_base 21: mod_base = um
  source 1..21: mol_type = other RNA
ncagaatcctgtcttgtcgtt

SEQ ID NO: 1230 - RNA, 21 nt, synthetic construct
  modified_base 1: mod_base = OTHER; note = 2'-O-methyladenosine
  modified_base 1^2: mod_base = OTHER; note = phosphorothioate linkage
  modified_base 2: mod_base = OTHER; note = 2'-fluorocytidine
  modified_base 3: mod_base = OTHER; note = 2'-O-methyladenosine
  modified_base 4: mod_base = gm
  modified_base 5: mod_base = OTHER; note = 2'-fluoroadenosine
  modified_base 6: mod_base = OTHER; note = 2'-O-methyladenosine
  modified_base 7: mod_base = um
  modified_base 8: mod_base = cm
  modified_base 9: mod_base = cm
  modified_base 10: mod_base = um
  modified_base 11: mod_base = gm
  modified_base 12: mod_base = OTHER; note = 2'-fluorouridine
  modified_base 13: mod_base = cm
  modified_base 14: mod_base = OTHER; note = 2'-fluorouridine
  modified_base 15: mod_base = um
  modified_base 16: mod_base = OTHER; note = 2'-fluoroguanosine
  modified_base 17: mod_base = um
  modified_base 18: mod_base = cm
  modified_base 19: mod_base = OTHER; note = 2'-O-methyladenosine
  modified_base 20: mod_base = um
  modified_base 20^21: mod_base = OTHER; note = phosphorothioate linkage
  modified_base 21: mod_base = cm
  source 1..21: mol_type = other RNA
acagaatcctgtcttgtcatc

SEQ ID NO: 1231 - RNA, 21 nt, synthetic construct
  modified_base 1: mod_base = um
  modified_base 1^2: mod_base = OTHER; note = phosphorothioate linkage
  modified_base 2: mod_base = OTHER; note = 2'-fluorouridine
  modified_base 2^3: mod_base = OTHER; note = phosphorothioate linkage
  modified_base 3: mod_base = OTHER; note = 2'-O-methyladenosine
  modified_base 3^4: mod_base = OTHER; note = phosphorothioate linkage
  modified_base 4: mod_base = gm
  modified_base 5: mod_base = gm
  modified_base 6: mod_base = OTHER; note = 2'-O-methyladenosine
  modified_base 7: mod_base = OTHER; note = 2'-fluoroadenosine
  modified_base 8: mod_base = OTHER; note = 2'-O-methyladenosine
  modified_base 9: mod_base = um
  modified_base 10: mod_base = cm
  modified_base 11: mod_base = cm
  modified_base 12: mod_base = OTHER; note = 2'-fluoroadenosine
  modified_base 13: mod_base = OTHER; note = 2'-O-methyladenosine
  modified_base 14: mod_base = OTHER; note = 2'-fluorouridine
  modified_base 15: mod_base = gm
  modified_base 16: mod_base = OTHER; note = 2'-fluorocytidine
  modified_base 17: mod_base = um
  modified_base 18: mod_base = gm
  modified_base 19: mod_base = um
  modified_base 20: mod_base = cm
  modified_base 20^21: mod_base = OTHER; note = phosphorothioate linkage
  modified_base 21: mod_base = um
  source 1..21: mol_type = other RNA
ttaggaaatccaatgctgtct

SEQ ID NO: 1232 - RNA, 21 nt, synthetic construct
  modified_base 1: mod_base = OTHER; note = 5'-cyclopropyl phosphonate-2'-O-methyluridine
  modified_base 1^2: mod_base = OTHER; note = phosphorothioate linkage
  modified_base 2: mod_base = OTHER; note = 2'-fluorouridine
  modified_base 2^3: mod_base = OTHER; note = phosphorothioate linkage
  modified_base 3: mod_base = OTHER; note = 2'-O-methyladenosine
  modified_base 3^4: mod_base = OTHER; note = phosphorothioate linkage
  modified_base 4: mod_base = gm
  modified_base 5: mod_base = gm
  modified_base 6: mod_base = OTHER; note = 2'-O-methyladenosine
  modified_base 7: mod_base = OTHER; note = 2'-fluoroadenosine
  modified_base 8: mod_base = OTHER; note = 2'-O-methyladenosine
  modified_base 9: mod_base = um
  modified_base 10: mod_base = cm
  modified_base 11: mod_base = cm
  modified_base 12: mod_base = OTHER; note = 2'-fluoroadenosine
  modified_base 13: mod_base = OTHER; note = 2'-O-methyladenosine
  modified_base 14: mod_base = OTHER; note = 2'-fluorouridine
  modified_base 15: mod_base = gm
  modified_base 16: mod_base = OTHER; note = 2'-fluorocytidine
  modified_base 17: mod_base = um
  modified_base 18: mod_base = gm
  modified_base 19: mod_base = um
  modified_base 20: mod_base = cm
  modified_base 20^21: mod_base = OTHER; note = phosphorothioate linkage
  modified_base 21: mod_base = um
  source 1..21: mol_type = other RNA
ttaggaaatccaatgctgtct

SEQ ID NO: 1233 - RNA, 21 nt, synthetic construct
  modified_base 1: mod_base = um
  modified_base 1^2: mod_base = OTHER; note = phosphorothioate linkage
  modified_base 2: mod_base = OTHER; note = 2'-fluoroadenosine
  modified_base 2^3: mod_base = OTHER; note = phosphorothioate linkage
  modified_base 3: mod_base = um
  modified_base 3^4: mod_base = OTHER; note = phosphorothioate linkage
  modified_base 4: mod_base = um
  modified_base 5: mod_base = gm
  modified_base 6: mod_base = OTHER; note = 2'-O-methyladenosine
  modified_base 7: mod_base = OTHER; note = 2'-fluoroadenosine
  modified_base 8: mod_base = gm
  modified_base 9: mod_base = cm
  modified_base 10: mod_base = OTHER; note = 2'-O-methyladenosine
  modified_base 11: mod_base = um
  modified_base 12: mod_base = OTHER; note = 2'-fluorouridine
  modified_base 13: mod_base = gm
  modified_base 14: mod_base = OTHER; note = 2'-fluoroadenosine
  modified_base 15: mod_base = gm
  modified_base 16: mod_base = OTHER; note = 2'-fluoroadenosine
  modified_base 17: mod_base = cm
  modified_base 18: mod_base = OTHER; note = 2'-O-methyladenosine
  modified_base 19: mod_base = cm
  modified_base 20: mod_base = cm
  modified_base 20^21: mod_base = OTHER; note = phosphorothioate linkage
  modified_base 21: mod_base = OTHER; note = 2'-O-methyladenosine
  source 1..21: mol_type = other RNA
tattgaagcattgagacacca

SEQ ID NO: 1234 - RNA, 21 nt, synthetic construct
  modified_base 1: mod_base = OTHER; note = 5'-cyclopropyl phosphonate-2'-O-methyluridine
  modified_base 1^2: mod_base = OTHER; note = phosphorothioate linkage
  modified_base 2: mod_base = OTHER; note = 2'-fluoroadenosine
  modified_base 3: mod_base = um
  modified_base 4: mod_base = um
  modified_base 5: mod_base = gm
  modified_base 6: mod_base = OTHER; note = 2'-O-methyladenosine
  modified_base 7: mod_base = OTHER; note = 2'-fluoroadenosine
  modified_base 8: mod_base = gm
  modified_base 9: mod_base = cm
  modified_base 10: mod_base = OTHER; note = 2'-O-methyladenosine
  modified_base 11: mod_base = um
  modified_base 12: mod_base = OTHER; note = 2'-fluorouridine
  modified_base 13: mod_base = gm
  modified_base 14: mod_base = OTHER; note = 2'-fluoroadenosine
  modified_base 15: mod_base = gm
  modified_base 16: mod_base = OTHER; note = 2'-fluoroadenosine
  modified_base 17: mod_base = cm
  modified_base 18: mod_base = OTHER; note = 2'-O-methyladenosine
  modified_base 19: mod_base = cm
  modified_base 20: mod_base = cm
  modified_base 20^21: mod_base = OTHER; note = phosphorothioate linkage
  modified_base 21: mod_base = OTHER; note = 2'-O-methyladenosine
  source 1..21: mol_type = other RNA
tattgaagcattgagacacca

SEQ ID NO: 1235 - RNA, 21 nt, synthetic construct
  modified_base 1: mod_base = um
  modified_base 1^2: mod_base = OTHER; note = phosphorothioate linkage
  modified_base 2: mod_base = OTHER; note = 2'-fluoroadenosine
  modified_base 2^3: mod_base = OTHER; note = phosphorothioate linkage
  modified_base 3: mod_base = um
  modified_base 3^4: mod_base = OTHER; note = phosphorothioate linkage
  modified_base 4: mod_base = um
  modified_base 5: mod_base = gm
  modified_base 6: mod_base = OTHER; note = 2'-O-methyladenosine
  modified_base 7: mod_base = OTHER; note = 2'-fluoroadenosine
  modified_base 8: mod_base = gm
  modified_base 9: mod_base = cm
  modified_base 10: mod_base = OTHER; note = 2'-O-methyladenosine
  modified_base 11: mod_base = um
  modified_base 12: mod_base = OTHER; note = 2'-fluorouridine
  modified_base 13: mod_base = gm
  modified_base 14: mod_base = OTHER; note = 2'-fluoroadenosine
  modified_base 15: mod_base = gm
  modified_base 16: mod_base = OTHER; note = 2'-fluoroadenosine
  modified_base 17: mod_base = cm
  modified_base 18: mod_base = OTHER; note = 2'-O-methyladenosine
  modified_base 19: mod_base = cm
  modified_base 20: mod_base = cm
  modified_base 20^21: mod_base = OTHER; note = phosphorothioate linkage
  modified_base 21: mod_base = gm
  source 1..21: mol_type = other RNA
tattgaagcattgagacaccg

SEQ ID NO: 1236 - RNA, 21 nt, synthetic construct
  modified_base 1: mod_base = um
  modified_base 1^2: mod_base = OTHER; note = phosphorothioate linkage
  modified_base 2: mod_base = OTHER; note = 2'-fluoroadenosine
  modified_base 2^3: mod_base = OTHER; note = phosphorothioate linkage
  modified_base 3: mod_base = um
  modified_base 3^4: mod_base = OTHER; note = phosphorothioate linkage
  modified_base 4: mod_base = um
  modified_base 5: mod_base = gm
  modified_base 6: mod_base = OTHER; note = 2'-O-methyladenosine
  modified_base 7: mod_base = OTHER; note = 2'-fluoroadenosine
  modified_base 8: mod_base = gm
  modified_base 9: mod_base = cm
  modified_base 10: mod_base = OTHER; note = 2'-O-methyladenosine
  modified_base 11: mod_base = um
  modified_base 12: mod_base = OTHER; note = 2'-fluorouridine
  modified_base 13: mod_base = gm
  modified_base 14: mod_base = OTHER; note = 2'-fluoroadenosine
  modified_base 15: mod_base = gm
  modified_base 16: mod_base = OTHER; note = 2'-fluoroadenosine
  modified_base 17: mod_base = cm
  modified_base 18: mod_base = OTHER; note = 2'-O-methyladenosine
  modified_base 19: mod_base = um
  modified_base 20: mod_base = cm
  modified_base 20^21: mod_base = OTHER; note = phosphorothioate linkage
  modified_base 21: mod_base = gm
  source 1..21: mol_type = other RNA
tattgaagcattgagacatcg

SEQ ID NO: 1237 - RNA, 21 nt, synthetic construct
  modified_base 1: mod_base = OTHER; note = 5'-cyclopropyl phosphonate-2'-O-methyluridine
  modified_base 1^2: mod_base = OTHER; note = phosphorothioate linkage
  modified_base 2: mod_base = OTHER; note = 2'-fluorocytidine
  modified_base 3: mod_base = OTHER; note = 2'-O-methyladenosine
  modified_base 4: mod_base = gm
  modified_base 5: mod_base = OTHER; note = 2'-fluoroadenosine
  modified_base 6: mod_base = OTHER; note = 2'-O-methyladenosine
  modified_base 7: mod_base = um
  modified_base 8: mod_base = cm
  modified_base 9: mod_base = cm
  modified_base 10: mod_base = um
  modified_base 11: mod_base = gm
  modified_base 12: mod_base = OTHER; note = 2'-fluorouridine
  modified_base 13: mod_base = cm
  modified_base 14: mod_base = OTHER; note = 2'-fluorouridine
  modified_base 15: mod_base = um
  modified_base 16: mod_base = OTHER; note = 2'-fluoroguanosine
  modified_base 17: mod_base = um
  modified_base 18: mod_base = cm
  modified_base 19: mod_base = gm
  modified_base 20: mod_base = um
  modified_base 20^21: mod_base = OTHER; note = phosphorothioate linkage
  modified_base 21: mod_base = um
  source 1..21: mol_type = other RNA
tcagaatcctgtcttgtcgtt

SEQ ID NO: 1238 - RNA, 21 nt, synthetic construct
  modified_base 1: mod_base = OTHER; note = 5'-cyclopropyl phosphonate-2'-O-methyluridine
  modified_base 1^2: mod_base = OTHER; note = phosphorothioate linkage
  modified_base 2: mod_base = OTHER; note = 2'-fluorocytidine
  modified_base 3: mod_base = OTHER; note = 2'-O-methyladenosine
  modified_base 4: mod_base = gm
  modified_base 5: mod_base = OTHER; note = 2'-fluoroadenosine
  modified_base 6: mod_base = OTHER; note = 2'-O-methyladenosine
  modified_base 7: mod_base = um
  modified_base 8: mod_base = cm
  modified_base 9: mod_base = cm
  modified_base 10: mod_base = um
  modified_base 11: mod_base = gm
  modified_base 12: mod_base = OTHER; note = 2'-fluorouridine
  modified_base 13: mod_base = cm
  modified_base 14: mod_base = OTHER; note = 2'-fluorouridine
  modified_base 15: mod_base = um
  modified_base 16: mod_base = OTHER; note = 2'-fluoroguanosine
  modified_base 17: mod_base = um
  modified_base 18: mod_base = cm
  modified_base 19: mod_base = OTHER; note = 2'-O-methyladenosine
  modified_base 20: mod_base = um
  modified_base 20^21: mod_base = OTHER; note = phosphorothioate linkage
  modified_base 21: mod_base = cm
  source 1..21: mol_type = other RNA
tcagaatcctgtcttgtcatc

SEQ ID NO: 1239 - RNA, 21 nt, synthetic construct
  modified_base 1: mod_base = OTHER; note = 5'-cyclopropyl phosphonate-2'-O-methyluridine
  modified_base 1^2: mod_base = OTHER; note = phosphorothioate linkage
  modified_base 2: mod_base = OTHER; note = 2'-fluorocytidine
  modified_base 3: mod_base = OTHER; note = 2'-O-methyladenosine
  modified_base 4: mod_base = gm
  modified_base 5: mod_base = OTHER; note = 2'-fluoroadenosine
  modified_base 6: mod_base = OTHER; note = 2'-O-methyladenosine
  modified_base 7: mod_base = um
  modified_base 8: mod_base = cm
  modified_base 9: mod_base = cm
  modified_base 10: mod_base = um
  modified_base 11: mod_base = gm
  modified_base 12: mod_base = OTHER; note = 2'-fluorouridine
  modified_base 13: mod_base = cm
  modified_base 14: mod_base = OTHER; note = 2'-fluorouridine
  modified_base 15: mod_base = um
  modified_base 16: mod_base = OTHER; note = 2'-fluoroguanosine
  modified_base 17: mod_base = um
  modified_base 18: mod_base = cm
  modified_base 19: mod_base = gm
  modified_base 20: mod_base = um
  modified_base 20^21: mod_base = OTHER; note = phosphorothioate linkage
  modified_base 21: mod_base = cm
  source 1..21: mol_type = other RNA
tcagaatcctgtcttgtcgtc

SEQ ID NO: 1240 - RNA, 21 nt, synthetic construct
  modified_base 1: mod_base = OTHER; note = 5'-cyclopropyl phosphonate-2'-O-methyluridine
  modified_base 1^2: mod_base = OTHER; note = phosphorothioate linkage
  modified_base 2: mod_base = OTHER; note = 2'-fluorocytidine
  modified_base 3: mod_base = OTHER; note = 2'-O-methyladenosine
  modified_base 4: mod_base = gm
  modified_base 5: mod_base = OTHER; note = 2'-fluoroadenosine
  modified_base 6: mod_base = OTHER; note = 2'-O-methyladenosine
  modified_base 7: mod_base = OTHER; note = 2',3'-seco-uridine
  modified_base 8: mod_base = cm
  modified_base 9: mod_base = cm
  modified_base 10: mod_base = um
  modified_base 11: mod_base = gm
  modified_base 12: mod_base = OTHER; note = 2'-fluorouridine
  modified_base 13: mod_base = cm
  modified_base 14: mod_base = OTHER; note = 2'-fluorouridine
  modified_base 15: mod_base = um
  modified_base 16: mod_base = OTHER; note = 2'-fluoroguanosine
  modified_base 17: mod_base = um
  modified_base 18: mod_base = cm
  modified_base 19: mod_base = gm
  modified_base 20: mod_base = um
  modified_base 20^21: mod_base = OTHER; note = phosphorothioate linkage
  modified_base 21: mod_base = um
  source 1..21: mol_type = other RNA
tcagaatcctgtcttgtcgtt

SEQ ID NO: 1241 - RNA, 21 nt, synthetic construct
  modified_base 1: mod_base = um
  modified_base 1^2: mod_base = OTHER; note = phosphorothioate linkage
  modified_base 2: mod_base = OTHER; note = 2'-fluorouridine
  modified_base 3: mod_base = um
  modified_base 4: mod_base = OTHER; note = 2'-O-methyladenosine
  modified_base 5: mod_base = OTHER; note = 2'-fluoroadenosine
  modified_base 6: mod_base = cm
  modified_base 7: mod_base = um
  modified_base 8: mod_base = um
  modified_base 9: mod_base = um
  modified_base 10: mod_base = cm
  modified_base 11: mod_base = um
  modified_base 12: mod_base = OTHER; note = 2'-fluorouridine
  modified_base 13: mod_base = cm
  modified_base 14: mod_base = OTHER; note = 2'-fluorouridine
  modified_base 15: mod_base = cm
  modified_base 16: mod_base = OTHER; note = 2'-fluorouridine
  modified_base 17: mod_base = OTHER; note = 2'-O-methyladenosine
  modified_base 18: mod_base = gm
  modified_base 19: mod_base = cm
  modified_base 20: mod_base = cm
  modified_base 20^21: mod_base = OTHER; note = phosphorothioate linkage
  modified_base 21: mod_base = um
  source 1..21: mol_type = other RNA
tttaactttcttctctagcct

SEQ ID NO: 1242 - RNA, 21 nt, synthetic construct
  modified_base 1: mod_base = um
  modified_base 1^2: mod_base = OTHER; note = phosphorothioate linkage
  modified_base 2: mod_base = OTHER; note = 2'-fluoroadenosine
  modified_base 2^3: mod_base = OTHER; note = phosphorothioate linkage
  modified_base 3: mod_base = gm
  modified_base 3^4: mod_base = OTHER; note = phosphorothioate linkage
  modified_base 4: mod_base = OTHER; note = 2'-O-methyladenosine
  modified_base 5: mod_base = OTHER; note = 2'-fluoroadenosine
  modified_base 6: mod_base = um
  modified_base 7: mod_base = cm
  modified_base 8: mod_base = cm
  modified_base 9: mod_base = um
  modified_base 10: mod_base = gm
  modified_base 11: mod_base = um
  modified_base 12: mod_base = OTHER; note = 2'-fluorocytidine
  modified_base 13: mod_base = um
  modified_base 14: mod_base = OTHER; note = 2'-fluorouridine
  modified_base 15: mod_base = gm
  modified_base 16: mod_base = OTHER; note = 2'-fluorouridine
  modified_base 17: mod_base = cm
  modified_base 18: mod_base = OTHER; note = 2'-O-methyladenosine
  modified_base 19: mod_base = um
  modified_base 20: mod_base = um
  modified_base 20^21: mod_base = OTHER; note = phosphorothioate linkage
  modified_base 21: mod_base = cm
  source 1..21: mol_type = other RNA
tagaatcctgtcttgtcattc

SEQ ID NO: 1243 - RNA, 21 nt, synthetic construct
  modified_base 1: mod_base = um
  modified_base 1^2: mod_base = OTHER; note = phosphorothioate linkage
  modified_base 2: mod_base = OTHER; note = 2'-fluorouridine
  modified_base 2^3: mod_base = OTHER; note = phosphorothioate linkage
  modified_base 3: mod_base = cm
  modified_base 3^4: mod_base = OTHER; note = phosphorothioate linkage
  modified_base 4: mod_base = OTHER; note = 2'-O-methyladenosine
  modified_base 5: mod_base = OTHER; note = 2'-fluoroguanosine
  modified_base 6: mod_base = OTHER; note = 2'-O-methyladenosine
  modified_base 7: mod_base = OTHER; note = 2'-O-methyladenosine
  modified_base 8: mod_base = um
  modified_base 9: mod_base = cm
  modified_base 10: mod_base = cm
  modified_base 11: mod_base = um
  modified_base 12: mod_base = OTHER; note = 2'-fluoroguanosine
  modified_base 13: mod_base = um
  modified_base 14: mod_base = OTHER; note = 2'-fluorocytidine
  modified_base 15: mod_base = um
  modified_base 16: mod_base = OTHER; note = 2'-fluorouridine
  modified_base 17: mod_base = gm
  modified_base 18: mod_base = um
  modified_base 19: mod_base = cm
  modified_base 20: mod_base = OTHER; note = 2'-O-methyladenosine
  modified_base 20^21: mod_base = OTHER; note = phosphorothioate linkage
  modified_base 21: mod_base = cm
  source 1..21: mol_type = other RNA
ttcagaatcctgtcttgtcac

SEQ ID NO: 1244 - RNA, 21 nt, synthetic construct
  modified_base 1: mod_base = OTHER; note = 2'-O-methylinosine
  modified_base 1^2: mod_base = OTHER; note = phosphorothioate linkage
  modified_base 2: mod_base = OTHER; note = 2'-fluorocytidine
  modified_base 3: mod_base = OTHER; note = 2'-O-methyladenosine
  modified_base 4: mod_base = gm
  modified_base 5: mod_base = OTHER; note = 2'-fluoroadenosine
  modified_base 6: mod_base = OTHER; note = 2'-O-methyladenosine
  modified_base 7: mod_base = um
  modified_base 8: mod_base = cm
  modified_base 9: mod_base = cm
  modified_base 10: mod_base = um
  modified_base 11: mod_base = gm
  modified_base 12: mod_base = OTHER; note = 2'-fluorouridine
  modified_base 13: mod_base = cm
  modified_base 14: mod_base = OTHER; note = 2'-fluorouridine
  modified_base 15: mod_base = um
  modified_base 16: mod_base = OTHER; note = 2'-fluoroguanosine
  modified_base 17: mod_base = um
  modified_base 18: mod_base = cm
  modified_base 19: mod_base = gm
  modified_base 20: mod_base = um
  modified_base 20^21: mod_base = OTHER; note = phosphorothioate linkage
  modified_base 21: mod_base = um
  source 1..21: mol_type = other RNA
ncagaatcctgtcttgtcgtt

SEQ ID NO: 1245 - RNA, 21 nt, synthetic construct
  modified_base 1: mod_base = OTHER; note = 2'-O-methyladenosine
  modified_base 1^2: mod_base = OTHER; note = phosphorothioate linkage
  modified_base 2: mod_base = OTHER; note = 2'-fluoroguanosine
  modified_base 2^3: mod_base = OTHER; note = phosphorothioate linkage
  modified_base 3: mod_base = gm
  modified_base 4: mod_base = cm
  modified_base 5: mod_base = OTHER; note = 2'-O-methyladenosine
  modified_base 6: mod_base = um
  modified_base 7: mod_base = OTHER; note = 2'-fluorocytidine
  modified_base 8: mod_base = um
  modified_base 9: mod_base = OTHER; note = 2'-O-methyladenosine
  modified_base 10: mod_base = OTHER; note = 2'-O-methyladenosine
  modified_base 11: mod_base = um
  modified_base 12: mod_base = OTHER; note = 2'-O-methyladenosine
  modified_base 13: mod_base = um
  modified_base 14: mod_base = OTHER; note = 2'-fluorouridine
  modified_base 15: mod_base = cm
  modified_base 16: mod_base = OTHER; note = 2'-fluorocytidine
  modified_base 17: mod_base = OTHER; note = 2'-O-methyladenosine
  modified_base 18: mod_base = gm
  modified_base 19: mod_base = gm
  modified_base 19^20: mod_base = OTHER; note = phosphorothioate linkage
  modified_base 20: mod_base = um
  modified_base 20^21: mod_base = OTHER; note = phosphorothioate linkage
  modified_base 21: mod_base = um
  source 1..21: mol_type = other RNA
aggcatctaatattccaggtt

SEQ ID NO: 1246 - RNA, 21 nt, synthetic construct
  modified_base 1: mod_base = um
  modified_base 1^2: mod_base = OTHER; note = phosphorothioate linkage
  modified_base 2: mod_base = OTHER; note = 2'-fluorocytidine
  modified_base 3: mod_base = um
  modified_base 4: mod_base = um
  modified_base 5: mod_base = OTHER; note = 2'-fluorouridine
  modified_base 6: mod_base = gm
  modified_base 7: mod_base = um
  modified_base 8: mod_base = gm
  modified_base 9: mod_base = um
  modified_base 10: mod_base = OTHER; note = 2'-O-methyladenosine
  modified_base 11: mod_base = gm
  modified_base 12: mod_base = OTHER; note = 2'-fluoroguanosine
  modified_base 13: mod_base = cm
  modified_base 14: mod_base = OTHER; note = 2'-fluorouridine
  modified_base 15: mod_base = gm
  modified_base 16: mod_base = OTHER; note = 2'-fluorocytidine
  modified_base 17: mod_base = OTHER; note = 2'-O-methyladenosine
  modified_base 18: mod_base = cm
  modified_base 19: mod_base = um
  modified_base 20: mod_base = gm
  modified_base 20^21: mod_base = OTHER; note = phosphorothioate linkage
  modified_base 21: mod_base = OTHER; note = 2'-O-methyladenosine
  source 1..21: mol_type = other RNA
tctttgtgtaggctgcactga

SEQ ID NO: 1247 - RNA, 21 nt, synthetic construct
  modified_base 1: mod_base = OTHER; note = 2'-O-methyladenosine
  modified_base 1^2: mod_base = OTHER; note = phosphorothioate linkage
  modified_base 2: mod_base = OTHER; note = 2'-fluoroadenosine
  modified_base 3: mod_base = cm
  modified_base 4: mod_base = um
  modified_base 5: mod_base = OTHER; note = 2'-fluorocytidine
  modified_base 6: mod_base = um
  modified_base 7: mod_base = um
  modified_base 8: mod_base = cm
  modified_base 9: mod_base = OTHER; note = 2'-O-methyladenosine
  modified_base 10: mod_base = gm
  modified_base 11: mod_base = um
  modified_base 12: mod_base = OTHER; note = 2'-fluoroguanosine
  modified_base 13: mod_base = um
  modified_base 14: mod_base = OTHER; note = 2'-fluorouridine
  modified_base 15: mod_base = um
  modified_base 16: mod_base = OTHER; note = 2'-fluorocytidine
  modified_base 17: mod_base = cm
  modified_base 18: mod_base = OTHER; note = 2'-O-methyladenosine
  modified_base 19: mod_base = gm
  modified_base 20: mod_base = cm
  modified_base 20^21: mod_base = OTHER; note = phosphorothioate linkage
  modified_base 21: mod_base = gm
  source 1..21: mol_type = other RNA
aactcttcagtgtttccagcg

SEQ ID NO: 1248 - RNA, 21 nt, synthetic construct
  modified_base 1: mod_base = um
  modified_base 1^2: mod_base = OTHER; note = phosphorothioate linkage
  modified_base 2: mod_base = OTHER; note = 2'-fluoroadenosine
  modified_base 3: mod_base = gm
  modified_base 4: mod_base = gm
  modified_base 5: mod_base = OTHER; note = 2'-fluorouridine
  modified_base 6: mod_base = OTHER; note = 2'-O-methyladenosine
  modified_base 7: mod_base = cm
  modified_base 8: mod_base = OTHER; note = 2'-O-methyladenosine
  modified_base 9: mod_base = cm
  modified_base 10: mod_base = OTHER; note = 2'-O-methyladenosine
  modified_base 11: mod_base = gm
  modified_base 12: mod_base = OTHER; note = 2'-fluoroguanosine
  modified_base 13: mod_base = gm
  modified_base 14: mod_base = OTHER; note = 2'-fluorouridine
  modified_base 15: mod_base = cm
  modified_base 16: mod_base = OTHER; note = 2'-fluorouridine
  modified_base 17: mod_base = cm
  modified_base 18: mod_base = cm
  modified_base 19: mod_base = cm
  modified_base 20: mod_base = OTHER; note = 2'-O-methyladenosine
  modified_base 20^21: mod_base = OTHER; note = phosphorothioate linkage
  modified_base 21: mod_base = cm
  source 1..21: mol_type = other RNA
taggtacacagggtctcccac

SEQ ID NO: 1249 - RNA, 21 nt, synthetic construct
  modified_base 1: mod_base = OTHER; note = 5'-cyclopropyl phosphonate-2'-O-methyluridine
  modified_base 1^2: mod_base = OTHER; note = phosphorothioate linkage
  modified_base 2: mod_base = OTHER; note = 2'-fluoroguanosine
  modified_base 3: mod_base = OTHER; note = 2'-O-methyladenosine
  modified_base 4: mod_base = OTHER; note = 2'-O-methyladenosine
  modified_base 5: mod_base = OTHER; note = 2'-O-methyladenosine
  modified_base 6: mod_base = gm
  modified_base 7: mod_base = OTHER; note = 2'-O-methyladenosine
  modified_base 8: mod_base = OTHER; note = 2'-O-methyladenosine
  modified_base 9: mod_base = cm
  modified_base 10: mod_base = um
  modified_base 11: mod_base = OTHER; note = 2'-O-methyladenosine
  modified_base 12: mod_base = gm
  modified_base 13: mod_base = um
  modified_base 14: mod_base = OTHER; note = 2'-fluorocytidine
  modified_base 15: mod_base = cm
  modified_base 16: mod_base = OTHER; note = 2'-O-methyladenosine
  modified_base 17: mod_base = um
  modified_base 18: mod_base = OTHER; note = 2'-O-methyladenosine
  modified_base 19: mod_base = OTHER; note = 2'-O-methyladenosine
  modified_base 20: mod_base = um
  modified_base 20^21: mod_base = OTHER; note = phosphorothioate linkage
  modified_base 21: mod_base = cm
  source 1..21: mol_type = other RNA
tgaaagaactagtccataatc

SEQ ID NO: 1250 - RNA, 21 nt, synthetic construct
  modified_base 1: mod_base = OTHER; note = 5'-cyclopropyl phosphonate-2'-O-methyluridine
  modified_base 1^2: mod_base = OTHER; note = phosphorothioate linkage
  modified_base 2: mod_base = OTHER; note = 2'-fluoroguanosine
  modified_base 3: mod_base = OTHER; note = 2'-O-methyladenosine
  modified_base 4: mod_base = OTHER; note = 2'-O-methyladenosine
  modified_base 5: mod_base = OTHER; note = 2'-O-methyladenosine
  modified_base 6: mod_base = OTHER; note = 2'-fluoroguanosine
  modified_base 7: mod_base = OTHER; note = 2'-O-methyladenosine
  modified_base 8: mod_base = OTHER; note = 2'-O-methyladenosine
  modified_base 9: mod_base = cm
  modified_base 10: mod_base = um
  modified_base 11: mod_base = OTHER; note = 2'-O-methyladenosine
  modified_base 12: mod_base = OTHER; note = 2'-fluorouridine
  modified_base 13: mod_base = um
  modified_base 14: mod_base = OTHER; note = 2'-fluorocytidine
  modified_base 15: mod_base = cm
  modified_base 16: mod_base = OTHER; note = 2'-fluoroadenosine
  modified_base 17: mod_base = um
  modified_base 18: mod_base = OTHER; note = 2'-O-methyladenosine
  modified_base 19: mod_base = OTHER; note = 2'-O-methyladenosine
  modified_base 19^20: mod_base = OTHER; note = phosphorothioate linkage
  modified_base 20: mod_base = um
  modified_base 20^21: mod_base = OTHER; note = phosphorothioate linkage
  modified_base 21: mod_base = cm
  source 1..21: mol_type = other RNA
tgaaagaactattccataatc

SEQ ID NO: 1251 - RNA, 21 nt, synthetic construct
  modified_base 1: mod_base = OTHER; note = 2'-O-methyladenosine
  modified_base 1^2: mod_base = OTHER; note = phosphorothioate linkage
  modified_base 2: mod_base = OTHER; note = 2'-fluorocytidine
  modified_base 3: mod_base = OTHER; note = 2'-O-methyladenosine
  modified_base 4: mod_base = gm
  modified_base 5: mod_base = OTHER; note = 2'-fluoroadenosine
  modified_base 6: mod_base = OTHER; note = 2'-O-methyladenosine
  modified_base 7: mod_base = um
  modified_base 8: mod_base = cm
  modified_base 9: mod_base = cm
  modified_base 10: mod_base = um
  modified_base 11: mod_base = gm
  modified_base 12: mod_base = OTHER; note = 2'-fluorouridine
  modified_base 13: mod_base = cm
  modified_base 14: mod_base = OTHER; note = 2'-fluorouridine
  modified_base 15: mod_base = um
  modified_base 16: mod_base = OTHER; note = 2'-fluoroguanosine
  modified_base 17: mod_base = um
  modified_base 18: mod_base = cm
  modified_base 19: mod_base = gm
  modified_base 20: mod_base = um
  modified_base 20^21: mod_base = OTHER; note = phosphorothioate linkage
  modified_base 21: mod_base = um
  source 1..21: mol_type = other RNA
acagaatcctgtcttgtcgtt

SEQ ID NO: 1252 - RNA, 21 nt, synthetic construct
  modified_base 1: mod_base = OTHER; note = 2'-O-methyladenosine
  modified_base 2: mod_base = cm
  modified_base 3: mod_base = cm
  modified_base 4: mod_base = OTHER; note = 2'-O-methyladenosine
  modified_base 5: mod_base = gm
  modified_base 6: mod_base = gm
  modified_base 7: mod_base = OTHER; note = 2'-O-methyladenosine
  modified_base 8: mod_base = gm
  modified_base 9: mod_base = OTHER; note = 2'-fluoroguanosine
  modified_base 10: mod_base = OTHER; note = 2'-fluoroguanosine
  modified_base 11: mod_base = OTHER; note = 2'-fluoroadenosine
  modified_base 12: mod_base = OTHER; note = 2'-O-methyladenosine
  modified_base 13: mod_base = OTHER; note = 2'-O-methyladenosine
  modified_base 14: mod_base = cm
  modified_base 15: mod_base = OTHER; note = 2'-O-methyladenosine
  modified_base 16: mod_base = um
  modified_base 17: mod_base = gm
  modified_base 18: mod_base = gm
  modified_base 19: mod_base = um
  modified_base 20: mod_base = um
  modified_base 21: mod_base = OTHER; note = 2'-O-methyladenosine
  source 1..21: mol_type = other RNA
accaggagggaaacatggtta

SEQ ID NO: 1253 - RNA, 21 nt, synthetic construct
  modified_base 1: mod_base = gm
  modified_base 2: mod_base = OTHER; note = 2'-O-methyladenosine
  modified_base 3: mod_base = um
  modified_base 4: mod_base = OTHER; note = 2'-O-methyladenosine
  modified_base 5: mod_base = OTHER; note = 2'-O-methyladenosine
  modified_base 6: mod_base = cm
  modified_base 7: mod_base = cm
  modified_base 8: mod_base = OTHER; note = 2'-O-methyladenosine
  modified_base 9: mod_base = OTHER; note = 2'-fluoroguanosine
  modified_base 10: mod_base = OTHER; note = 2'-fluorocytidine
  modified_base 11: mod_base = OTHER; note = 2'-fluorouridine
  modified_base 12: mod_base = um
  modified_base 13: mod_base = cm
  modified_base 14: mod_base = cm
  modified_base 15: mod_base = um
  modified_base 16: mod_base = gm
  modified_base 17: mod_base = OTHER; note = 2'-O-methyladenosine
  modified_base 18: mod_base = OTHER; note = 2'-O-methyladenosine
  modified_base 19: mod_base = gm
  modified_base 20: mod_base = um
  modified_base 21: mod_base = OTHER; note = 2'-O-methyladenosine
  source 1..21: mol_type = other RNA
gataaccagcttcctgaagta

SEQ ID NO: 1254 - RNA, 21 nt, synthetic construct
  modified_base 1: mod_base = cm
  modified_base 2: mod_base = OTHER; note = 2'-O-methyladenosine
  modified_base 3: mod_base = um
  modified_base 4: mod_base = cm
  modified_base 5: mod_base = OTHER; note = 2'-O-methyladenosine
  modified_base 6: mod_base = OTHER; note = 2'-O-methyladenosine
  modified_base 7: mod_base = OTHER; note = 2'-O-methyladenosine
  modified_base 8: mod_base = um
  modified_base 9: mod_base = OTHER; note = 2'-fluoroadenosine
  modified_base 10: mod_base = OTHER; note = 2'-fluoroguanosine
  modified_base 11: mod_base = OTHER; note = 2'-fluorocytidine
  modified_base 12: mod_base = OTHER; note = 2'-O-methyladenosine
  modified_base 13: mod_base = gm
  modified_base 14: mod_base = OTHER; note = 2'-O-methyladenosine
  modified_base 15: mod_base = cm
  modified_base 16: mod_base = um
  modified_base 17: mod_base = um
  modified_base 18: mod_base = gm
  modified_base 19: mod_base = um
  modified_base 20: mod_base = um
  modified_base 21: mod_base = OTHER; note = 2'-O-methyladenosine
  source 1..21: mol_type = other RNA
catcaaatagcagacttgtta

SEQ ID NO: 1255 - RNA, 21 nt, synthetic construct
  modified_base 1: mod_base = cm
  modified_base 2: mod_base = cm
  modified_base 3: mod_base = OTHER; note = 2'-O-methyladenosine
  modified_base 4: mod_base = OTHER; note = 2'-O-methyladenosine
  modified_base 5: mod_base = OTHER; note = 2'-O-methyladenosine
  modified_base 6: mod_base = um
  modified_base 7: mod_base = OTHER; note = 2'-O-methyladenosine
  modified_base 8: mod_base = gm
  modified_base 9: mod_base = OTHER; note = 2'-fluorocytidine
  modified_base 10: mod_base = OTHER; note = 2'-fluoroadenosine
  modified_base 11: mod_base = OTHER; note = 2'-fluoroguanosine
  modified_base 12: mod_base = OTHER; note = 2'-O-methyladenosine
  modified_base 13: mod_base = cm
  modified_base 14: mod_base = um
  modified_base 15: mod_base = um
  modified_base 16: mod_base = OTHER; note = 2'-O-methylinosine
  modified_base 17: mod_base = um
  modified_base 18: mod_base = um
  modified_base 19: mod_base = cm
  modified_base 20: mod_base = cm
  modified_base 21: mod_base = OTHER; note = 2'-O-methyladenosine
  source 1..21: mol_type = other RNA
ccaaatagcagacttnttcca

SEQ ID NO: 1256 - RNA, 21 nt, synthetic construct
  modified_base 1: mod_base = gm
  modified_base 2: mod_base = OTHER; note = 2'-O-methyladenosine
  modified_base 3: mod_base = gm
  modified_base 4: mod_base = gm
  modified_base 5: mod_base = OTHER; note = 2'-O-methyladenosine
  modified_base 6: mod_base = cm
  modified_base 7: mod_base = cm
  modified_base 8: mod_base = OTHER; note = 2'-O-methyladenosine
  modified_base 9: mod_base = OTHER; note = 2'-fluoroguanosine
  modified_base 10: mod_base = OTHER; note = 2'-fluoroadenosine
  modified_base 11: mod_base = OTHER; note = 2'-fluorouridine
  modified_base 12: mod_base = um
  modified_base 13: mod_base = gm
  modified_base 14: mod_base = cm
  modified_base 15: mod_base = um
  modified_base 16: mod_base = um
  modified_base 17: mod_base = OTHER; note = 2'-O-methyladenosine
  modified_base 18: mod_base = cm
  modified_base 19: mod_base = um
  modified_base 20: mod_base = cm
  modified_base 21: mod_base = OTHER; note = 2'-O-methyladenosine
  source 1..21: mol_type = other RNA
gaggaccagattgcttactca

SEQ ID NO: 1257 - RNA, 21 nt, synthetic construct
  modified_base 1: mod_base = OTHER; note = 2'-O-methyladenosine
  modified_base 2: mod_base = cm
  modified_base 3: mod_base = cm
  modified_base 4: mod_base = OTHER; note = 2'-O-methyladenosine
  modified_base 5: mod_base = gm
  modified_base 6: mod_base = OTHER; note = 2'-O-methyladenosine
  modified_base 7: mod_base = um
  modified_base 8: mod_base = um
  modified_base 9: mod_base = OTHER; note = 2'-fluoroguanosine
  modified_base 10: mod_base = OTHER; note = 2'-fluorocytidine
  modified_base 11: mod_base = OTHER; note = 2'-fluorouridine
  modified_base 12: mod_base = um
  modified_base 13: mod_base = OTHER; note = 2'-O-methyladenosine
  modified_base 14: mod_base = cm
  modified_base 15: mod_base = um
  modified_base 16: mod_base = cm
  modified_base 17: mod_base = OTHER; note = 2'-O-methyladenosine
  modified_base 18: mod_base = gm
  modified_base 19: mod_base = OTHER; note = 2'-O-methyladenosine
  modified_base 20: mod_base = cm
  modified_base 21: mod_base = OTHER; note = 2'-O-methyladenosine
  source 1..21: mol_type = other RNA
accagattgcttactcagaca

SEQ ID NO: 1258 - RNA, 21 nt, synthetic construct
  modified_base 1: mod_base = gm
  modified_base 2: mod_base = OTHER; note = 2'-O-methyladenosine
  modified_base 3: mod_base = um
  modified_base 4: mod_base = um
  modified_base 5: mod_base = gm
  modified_base 6: mod_base = cm
  modified_base 7: mod_base = um
  modified_base 8: mod_base = um
  modified_base 9: mod_base = OTHER; note = 2'-fluoroadenosine
  modified_base 10: mod_base = OTHER; note = 2'-fluorocytidine
  modified_base 11: mod_base = OTHER; note = 2'-fluorouridine
  modified_base 12: mod_base = cm
  modified_base 13: mod_base = OTHER; note = 2'-O-methyladenosine
  modified_base 14: mod_base = gm
  modified_base 15: mod_base = OTHER; note = 2'-O-methyladenosine
  modified_base 16: mod_base = cm
  modified_base 17: mod_base = OTHER; note = 2'-O-methyladenosine
  modified_base 18: mod_base = cm
  modified_base 19: mod_base = cm
  modified_base 20: mod_base = OTHER; note = 2'-O-methyladenosine
  modified_base 21: mod_base = OTHER; note = 2'-O-methyladenosine
  source 1..21: mol_type = other RNA
gattgcttactcagacaccaa

SEQ ID NO: 1259 - RNA, 21 nt, synthetic construct
  modified_base 1: mod_base = cm
  modified_base 2: mod_base = OTHER; note = 2'-O-methyladenosine
  modified_base 3: mod_base = gm
  modified_base 4: mod_base = gm
  modified_base 5: mod_base = cm
  modified_base 6: mod_base = um
  modified_base 7: mod_base = OTHER; note = 2'-O-methyladenosine
  modified_base 8: mod_base = gm
  modified_base 9: mod_base = OTHER; note = 2'-fluoroadenosine
  modified_base 10: mod_base = OTHER; note = 2'-fluoroguanosine
  modified_base 11: mod_base = OTHER; note = 2'-fluoroadenosine
  modified_base 12: mod_base = OTHER; note = 2'-O-methyladenosine
  modified_base 13: mod_base = gm
  modified_base 14: mod_base = OTHER; note = 2'-O-methyladenosine
  modified_base 15: mod_base = OTHER; note = 2'-O-methyladenosine
  modified_base 16: mod_base = OTHER; note = 2'-O-methyladenosine
  modified_base 17: mod_base = gm
  modified_base 18: mod_base = um
  modified_base 19: mod_base = um
  modified_base 20: mod_base = OTHER; note = 2'-O-methyladenosine
  modified_base 21: mod_base = OTHER; note = 2'-O-methyladenosine
  source 1..21: mol_type = other RNA
caggctagagaagaaagttaa

SEQ ID NO: 1260 - RNA, 21 nt, synthetic construct
  modified_base 1: mod_base = gm
  modified_base 2: mod_base = um
  modified_base 3: mod_base = um
  modified_base 4: mod_base = cm
  modified_base 5: mod_base = cm
  modified_base 6: mod_base = OTHER; note = 2'-O-methyladenosine
  modified_base 7: mod_base = gm
  modified_base 8: mod_base = OTHER; note = 2'-O-methyladenosine
  modified_base 9: mod_base = OTHER; note = 2'-fluorouridine
  modified_base 10: mod_base = OTHER; note = 2'-fluoroguanosine
  modified_base 11: mod_base = OTHER; note = 2'-fluorocytidine
  modified_base 12: mod_base = OTHER; note = 2'-O-methyladenosine
  modified_base 13: mod_base = um
  modified_base 14: mod_base = um
  modified_base 15: mod_base = um
  modified_base 16: mod_base = um
  modified_base 17: mod_base = OTHER; note = 2'-O-methyladenosine
  modified_base 18: mod_base = OTHER; note = 2'-O-methyladenosine
  modified_base 19: mod_base = cm
  modified_base 20: mod_base = cm
  modified_base 21: mod_base = OTHER; note = 2'-O-methyladenosine
  source 1..21: mol_type = other RNA
gttccagatgcattttaacca

SEQ ID NO: 1261 - RNA, 21 nt, synthetic construct
  modified_base 1: mod_base = um
  modified_base 2: mod_base = gm
  modified_base 3: mod_base = OTHER; note = 2'-O-methyladenosine
  modified_base 4: mod_base = cm
  modified_base 5: mod_base = cm
  modified_base 6: mod_base = cm
  modified_base 7: mod_base = um
  modified_base 8: mod_base = um
  modified_base 9: mod_base = OTHER; note = 2'-fluorocytidine
  modified_base 10: mod_base = OTHER; note = 2'-fluoroadenosine
  modified_base 11: mod_base = OTHER; note = 2'-fluoroguanosine
  modified_base 12: mod_base = OTHER; note = 2'-O-methyladenosine
  modified_base 13: mod_base = OTHER; note = 2'-O-methyladenosine
  modified_base 14: mod_base = cm
  modified_base 15: mod_base = gm
  modified_base 16: mod_base = OTHER; note = 2'-O-methyladenosine
  modified_base 17: mod_base = OTHER; note = 2'-O-methyladenosine
  modified_base 18: mod_base = OTHER; note = 2'-O-methyladenosine
  modified_base 19: mod_base = gm
  modified_base 20: mod_base = um
  modified_base 21: mod_base = um
  source 1..21: mol_type = other RNA
tgacccttcagaacgaaagtt

SEQ ID NO: 1262 - RNA, 21 nt, synthetic construct
  modified_base 1: mod_base = cm
  modified_base 2: mod_base = OTHER; note = 2'-O-methyladenosine
  modified_base 3: mod_base = gm
  modified_base 4: mod_base = OTHER; note = 2'-O-methyladenosine
  modified_base 5: mod_base = OTHER; note = 2'-O-methyladenosine
  modified_base 6: mod_base = cm
  modified_base 7: mod_base = gm
  modified_base 8: mod_base = OTHER; note = 2'-O-methyladenosine
  modified_base 9: mod_base = OTHER; note = 2'-fluoroadenosine
  modified_base 10: mod_base = OTHER; note = 2'-fluoroadenosine
  modified_base 11: mod_base = OTHER; note = 2'-fluoroguanosine
  modified_base 12: mod_base = um
  modified_base 13: mod_base = um
  modified_base 14: mod_base = OTHER; note = 2'-O-methyladenosine
  modified_base 15: mod_base = um
  modified_base 16: mod_base = OTHER; note = 2'-O-methyladenosine
  modified_base 17: mod_base = um
  modified_base 18: mod_base = gm
  modified_base 19: mod_base = gm
  modified_base 20: mod_base = OTHER; note = 2'-O-methyladenosine
  modified_base 21: mod_base = OTHER; note = 2'-O-methyladenosine
  source 1..21: mol_type = other RNA
cagaacgaaagttatatggaa

SEQ ID NO: 1263 - RNA, 21 nt, synthetic construct
  modified_base 1: mod_base = cm
  modified_base 2: mod_base = gm
  modified_base 3: mod_base = OTHER; note = 2'-O-methyladenosine
  modified_base 4: mod_base = OTHER; note = 2'-O-methyladenosine
  modified_base 5: mod_base = OTHER; note = 2'-O-methyladenosine
  modified_base 6: mod_base = gm
  modified_base 7: mod_base = um
  modified_base 8: mod_base = um
  modified_base 9: mod_base = OTHER; note = 2'-fluoroadenosine
  modified_base 10: mod_base = OTHER; note = 2'-fluorouridine
  modified_base 11: mod_base = OTHER; note = 2'-fluoroadenosine
  modified_base 12: mod_base = um
  modified_base 13: mod_base = gm
  modified_base 14: mod_base = gm
  modified_base 15: mod_base = OTHER; note = 2'-O-methyladenosine
  modified_base 16: mod_base = OTHER; note = 2'-O-methyladenosine
  modified_base 17: mod_base = OTHER; note = 2'-O-methyladenosine
  modified_base 18: mod_base = OTHER; note = 2'-O-methyladenosine
  modified_base 19: mod_base = um
  modified_base 20: mod_base = cm
  modified_base 21: mod_base = OTHER; note = 2'-O-methyladenosine
  source 1..21: mol_type = other RNA
cgaaagttatatggaaaatca

SEQ ID NO: 1264 - RNA, 21 nt, synthetic construct
  modified_base 1: mod_base = cm
  modified_base 2: mod_base = OTHER; note = 2'-O-methyladenosine
  modified_base 3: mod_base = um
  modified_base 4: mod_base = gm
  modified_base 5: mod_base = gm
  modified_base 6: mod_base = OTHER; note = 2'-O-methyladenosine
  modified_base 7: mod_base = OTHER; note = 2'-O-methyladenosine
  modified_base 8: mod_base = OTHER; note = 2'-O-methyladenosine
  modified_base 9: mod_base = OTHER; note = 2'-fluoroadenosine
  modified_base 10: mod_base = OTHER; note = 2'-fluorouridine
  modified_base 11: mod_base = OTHER; note = 2'-fluorocytidine
  modified_base 12: mod_base = OTHER; note = 2'-O-methyladenosine
  modified_base 13: mod_base = cm
  modified_base 14: mod_base = cm
  modified_base 15: mod_base = OTHER; note = 2'-O-methyladenosine
  modified_base 16: mod_base = cm
  modified_base 17: mod_base = um
  modified_base 18: mod_base = cm
  modified_base 19: mod_base = um
  modified_base 20: mod_base = um
  modified_base 21: mod_base = um
  source 1..21: mol_type = other RNA
catggaaaatcaccactcttt

SEQ ID NO: 1265 - RNA, 21 nt, synthetic construct
  modified_base 1: mod_base = gm
  modified_base 2: mod_base = um
  modified_base 3: mod_base = gm
  modified_base 4: mod_base = um
  modified_base 5: mod_base = cm
  modified_base 6: mod_base = cm
  modified_base 7: mod_base = um
  modified_base 8: mod_base = gm
  modified_base 9: mod_base = OTHER; note = 2'-fluoroguanosine
  modified_base 10: mod_base = OTHER; note = 2'-fluoroadenosine
  modified_base 11: mod_base = OTHER; note = 2'-fluoroadenosine
  modified_base 12: mod_base = um
  modified_base 13: mod_base = OTHER; note = 2'-O-methyladenosine
  modified_base 14: mod_base = um
  modified_base 15: mod_base = um
  modified_base 16: mod_base = OTHER; note = 2'-O-methyladenosine
  modified_base 17: mod_base = gm
  modified_base 18: mod_base = OTHER; note = 2'-O-methyladenosine
  modified_base 19: mod_base = um
  modified_base 20: mod_base = gm
  modified_base 21: mod_base = OTHER; note = 2'-O-methyladenosine
  source 1..21: mol_type = other RNA
gtgtcctggaatattagatga

SEQ ID NO: 1266 - RNA, 21 nt, synthetic construct
  modified_base 1: mod_base = gm
  modified_base 2: mod_base = um
  modified_base 3: mod_base = um
  modified_base 4: mod_base = cm
  modified_base 5: mod_base = um
  modified_base 6: mod_base = cm
  modified_base 7: mod_base = OTHER; note = 2'-O-methyladenosine
  modified_base 8: mod_base = OTHER; note = 2'-O-methyladenosine
  modified_base 9: mod_base = OTHER; note = 2'-fluoroadenosine
  modified_base 10: mod_base = OTHER; note = 2'-fluoroadenosine
  modified_base 11: mod_base = OTHER; note = 2'-fluoroadenosine
  modified_base 12: mod_base = um
  modified_base 13: mod_base = gm
  modified_base 14: mod_base = OTHER; note = 2'-O-methyladenosine
  modified_base 15: mod_base = cm
  modified_base 16: mod_base = OTHER; note = 2'-O-methyladenosine
  modified_base 17: mod_base = OTHER; note = 2'-O-methyladenosine
  modified_base 18: mod_base = cm
  modified_base 19: mod_base = OTHER; note = 2'-O-methyladenosine
  modified_base 20: mod_base = cm
  modified_base 21: mod_base = um
  source 1..21: mol_type = other RNA
gttctcaaaaatgacaacact

SEQ ID NO: 1267 - RNA, 21 nt, synthetic construct
  modified_base 1: mod_base = gm
  modified_base 2: mod_base = OTHER; note = 2'-O-methyladenosine
  modified_base 3: mod_base = um
  modified_base 4: mod_base = gm
  modified_base 5: mod_base = OTHER; note = 2'-O-methyladenosine
  modified_base 6: mod_base = cm
  modified_base 7: mod_base = OTHER; note = 2'-O-methyladenosine
  modified_base 8: mod_base = OTHER; note = 2'-O-methyladenosine
  modified_base 9: mod_base = OTHER; note = 2'-fluorocytidine
  modified_base 10: mod_base = OTHER; note = 2'-fluoroadenosine
  modified_base 11: mod_base = OTHER; note = 2'-fluorocytidine
  modified_base 12: mod_base = um
  modified_base 13: mod_base = um
  modified_base 14: mod_base = gm
  modified_base 15: mod_base = OTHER; note = 2'-O-methyladenosine
  modified_base 16: mod_base = OTHER; note = 2'-O-methyladenosine
  modified_base 17: mod_base = gm
  modified_base 18: mod_base = cm
  modified_base 19: mod_base = OTHER; note = 2'-O-methyladenosine
  modified_base 20: mod_base = um
  modified_base 21: mod_base = OTHER; note = 2'-O-methyladenosine
  source 1..21: mol_type = other RNA
gatgacaacacttgaagcata

SEQ ID NO: 1268 - RNA, 21 nt, synthetic construct
  modified_base 1: mod_base = gm
  modified_base 2: mod_base = cm
  modified_base 3: mod_base = OTHER; note = 2'-O-methyladenosine
  modified_base 4: mod_base = OTHER; note = 2'-O-methyladenosine
  modified_base 5: mod_base = cm
  modified_base 6: mod_base = OTHER; note = 2'-O-methyladenosine
  modified_base 7: mod_base = cm
  modified_base 8: mod_base = um
  modified_base 9: mod_base = OTHER; note = 2'-fluorouridine
  modified_base 10: mod_base = OTHER; note = 2'-fluoroguanosine
  modified_base 11: mod_base = OTHER; note = 2'-fluoroadenosine
  modified_base 12: mod_base = OTHER; note = 2'-O-methyladenosine
  modified_base 13: mod_base = gm
  modified_base 14: mod_base = cm
  modified_base 15: mod_base = OTHER; note = 2'-O-methyladenosine
  modified_base 16: mod_base = um
  modified_base 17: mod_base = gm
  modified_base 18: mod_base = gm
  modified_base 19: mod_base = um
  modified_base 20: mod_base = gm
  modified_base 21: mod_base = um
  source 1..21: mol_type = other RNA
gcaacacttgaagcatggtgt

SEQ ID NO: 1269 - RNA, 21 nt, synthetic construct
  modified_base 1: mod_base = gm
  modified_base 2: mod_base = OTHER; note = 2'-O-methyladenosine
  modified_base 3: mod_base = OTHER; note = 2'-O-methyladenosine
  modified_base 4: mod_base = gm
  modified_base 5: mod_base = cm
  modified_base 6: mod_base = OTHER; note = 2'-O-methyladenosine
  modified_base 7: mod_base = um
  modified_base 8: mod_base = gm
  modified_base 9: mod_base = OTHER; note = 2'-fluoroguanosine
  modified_base 10: mod_base = OTHER; note = 2'-fluorouridine
  modified_base 11: mod_base = OTHER; note = 2'-fluoroguanosine
  modified_base 12: mod_base = um
  modified_base 13: mod_base = um
  modified_base 14: mod_base = um
  modified_base 15: mod_base = cm
  modified_base 16: mod_base = OTHER; note = 2'-O-methyladenosine
  modified_base 17: mod_base = gm
  modified_base 18: mod_base = OTHER; note = 2'-O-methyladenosine
  modified_base 19: mod_base = OTHER; note = 2'-O-methyladenosine
  modified_base 20: mod_base = cm
  modified_base 21: mod_base = um
  source 1..21: mol_type = other RNA
gaagcatggtgtttcagaact

SEQ ID NO: 1270 - RNA, 21 nt, synthetic construct
  modified_base 1: mod_base = um
  modified_base 2: mod_base = gm
  modified_base 3: mod_base = gm
  modified_base 4: mod_base = um
  modified_base 5: mod_base = gm
  modified_base 6: mod_base = um
  modified_base 7: mod_base = cm
  modified_base 8: mod_base = um
  modified_base 9: mod_base = OTHER; note = 2'-fluorocytidine
  modified_base 10: mod_base = OTHER; note = 2'-fluoroadenosine
  modified_base 11: mod_base = OTHER; note = 2'-fluoroadenosine
  modified_base 12: mod_base = um
  modified_base 13: mod_base = gm
  modified_base 14: mod_base = cm
  modified_base 15: mod_base = um
  modified_base 16: mod_base = um
  modified_base 17: mod_base = cm
  modified_base 18: mod_base = OTHER; note = 2'-O-methyladenosine
  modified_base 19: mod_base = OTHER; note = 2'-O-methyladenosine
  modified_base 20: mod_base = um
  modified_base 21: mod_base = OTHER; note = 2'-O-methyladenosine
  source 1..21: mol_type = other RNA
tggtgtctcaatgcttcaata

SEQ ID NO: 1271 - RNA, 21 nt, synthetic construct
  modified_base 1: mod_base = cm
  modified_base 2: mod_base = gm
  modified_base 3: mod_base = um
  modified_base 4: mod_base = cm
  modified_base 5: mod_base = um
  modified_base 6: mod_base = cm
  modified_base 7: mod_base = OTHER; note = 2'-O-methyladenosine
  modified_base 8: mod_base = OTHER; note = 2'-O-methyladenosine
  modified_base 9: mod_base = OTHER; note = 2'-fluorouridine
  modified_base 10: mod_base = OTHER; note = 2'-fluoroguanosine
  modified_base 11: mod_base = OTHER; note = 2'-fluorocytidine
  modified_base 12: mod_base = um
  modified_base 13: mod_base = um
  modified_base 14: mod_base = cm
  modified_base 15: mod_base = OTHER; note = 2'-O-methyladenosine
  modified_base 16: mod_base = OTHER; note = 2'-O-methyladenosine
  modified_base 17: mod_base = um
  modified_base 18: mod_base = gm
  modified_base 19: mod_base = um
  modified_base 20: mod_base = cm
  modified_base 21: mod_base = OTHER; note = 2'-O-methyladenosine
  source 1..21: mol_type = other RNA
cgtctcaatgcttcaatgtca

SEQ ID NO: 1272 - RNA, 21 nt, synthetic construct
  modified_base 1: mod_base = gm
  modified_base 2: mod_base = gm
  modified_base 3: mod_base = OTHER; note = 2'-O-methyladenosine
  modified_base 4: mod_base = cm
  modified_base 5: mod_base = OTHER; note = 2'-O-methyladenosine
  modified_base 6: mod_base = gm
  modified_base 7: mod_base = gm
  modified_base 8: mod_base = OTHER; note = 2'-O-methyladenosine
  modified_base 9: mod_base = OTHER; note = 2'-fluorouridine
  modified_base 10: mod_base = OTHER; note = 2'-fluorouridine
  modified_base 11: mod_base = OTHER; note = 2'-fluorocytidine
  modified_base 12: mod_base = um
  modified_base 13: mod_base = gm
  modified_base 14: mod_base = OTHER; note = 2'-O-methyladenosine
  modified_base 15: mod_base = OTHER; note = 2'-O-methyladenosine
  modified_base 16: mod_base = OTHER; note = 2'-O-methyladenosine
  modified_base 17: mod_base = OTHER; note = 2'-O-methyladenosine
  modified_base 18: mod_base = cm
  modified_base 19: mod_base = um
  modified_base 20: mod_base = cm
  modified_base 21: mod_base = OTHER; note = 2'-O-methyladenosine
  source 1..21: mol_type = other RNA
ggacaggattctgaaaactca

SEQ ID NO: 1273 - RNA, 21 nt, synthetic construct
  modified_base 1: mod_base = gm
  modified_base 2: mod_base = cm
  modified_base 3: mod_base = um
  modified_base 4: mod_base = gm
  modified_base 5: mod_base = OTHER; note = 2'-O-methyladenosine
  modified_base 6: mod_base = um
  modified_base 7: mod_base = um
  modified_base 8: mod_base = OTHER; note = 2'-O-methyladenosine
  modified_base 9: mod_base = OTHER; note = 2'-fluorouridine
  modified_base 10: mod_base = OTHER; note = 2'-fluoroguanosine
  modified_base 11: mod_base = OTHER; note = 2'-fluoroguanosine
  modified_base 12: mod_base = OTHER; note = 2'-O-methyladenosine
  modified_base 13: mod_base = OTHER; note = 2'-O-methyladenosine
  modified_base 14: mod_base = um
  modified_base 15: mod_base = OTHER; note = 2'-O-methyladenosine
  modified_base 16: mod_base = gm
  modified_base 17: mod_base = um
  modified_base 18: mod_base = um
  modified_base 19: mod_base = cm
  modified_base 20: mod_base = um
  modified_base 21: mod_base = um
  source 1..21: mol_type = other RNA
gctgattatggaatagttctt

SEQ ID NO: 1274 - RNA, 21 nt, synthetic construct
  modified_base 1: mod_base = gm
  modified_base 2: mod_base = OTHER; note = 2'-O-methyladenosine
  modified_base 3: mod_base = um
  modified_base 4: mod_base = um
  modified_base 5: mod_base = OTHER; note = 2'-O-methyladenosine
  modified_base 6: mod_base = um
  modified_base 7: mod_base = gm
  modified_base 8: mod_base = gm
  modified_base 9: mod_base = OTHER; note = 2'-fluoroadenosine
  modified_base 10: mod_base = OTHER; note = 2'-fluoroadenosine
  modified_base 11: mod_base = OTHER; note = 2'-fluorouridine
  modified_base 12: mod_base = OTHER; note = 2'-O-methyladenosine
  modified_base 13: mod_base = gm
  modified_base 14: mod_base = um
  modified_base 15: mod_base = um
  modified_base 16: mod_base = cm
  modified_base 17: mod_base = um
  modified_base 18: mod_base = um
  modified_base 19: mod_base = um
  modified_base 20: mod_base = cm
  modified_base 21: mod_base = um
  source 1..21: mol_type = other RNA
gattatggaatagttctttct

SEQ ID NO: 1275 - RNA, 21 nt, synthetic construct
  modified_base 1: mod_base = gm
  modified_base 2: mod_base = um
  modified_base 3: mod_base = um
  modified_base 4: mod_base = um
  modified_base 5: mod_base = um
  modified_base 6: mod_base = cm
  modified_base 7: mod_base = cm
  modified_base 8: mod_base = OTHER; note = 2'-O-methyladenosine
  modified_base 9: mod_base = OTHER; note = 2'-fluorouridine
  modified_base 10: mod_base = OTHER; note = 2'-fluoroadenosine
  modified_base 11: mod_base = OTHER; note = 2'-fluoroguanosine
  modified_base 12: mod_base = OTHER; note = 2'-O-methyladenosine
  modified_base 13: mod_base = um
  modified_base 14: mod_base = cm
  modified_base 15: mod_base = um
  modified_base 16: mod_base = OTHER; note = 2'-O-methylinosine
  modified_base 17: mod_base = gm
  modified_base 18: mod_base = OTHER; note = 2'-O-methyladenosine
  modified_base 19: mod_base = um
  modified_base 20: mod_base = cm
  modified_base 21: mod_base = um
  source 1..21: mol_type = other RNA
gttttccatagatctngatct

SEQ ID NO: 1276 - RNA, 21 nt, synthetic construct
  modified_base 1: mod_base = gm
  modified_base 2: mod_base = cm
  modified_base 3: mod_base = um
  modified_base 4: mod_base = um
  modified_base 5: mod_base = cm
  modified_base 6: mod_base = um
  modified_base 7: mod_base = cm
  modified_base 8: mod_base = OTHER; note = 2'-O-methyladenosine
  modified_base 9: mod_base = OTHER; note = 2'-fluoroguanosine
  modified_base 10: mod_base = OTHER; note = 2'-fluoroadenosine
  modified_base 11: mod_base = OTHER; note = 2'-fluorocytidine
  modified_base 12: mod_base = OTHER; note = 2'-O-methyladenosine
  modified_base 13: mod_base = gm
  modified_base 14: mod_base = cm
  modified_base 15: mod_base = OTHER; note = 2'-O-methyladenosine
  modified_base 16: mod_base = um
  modified_base 17: mod_base = um
  modified_base 18: mod_base = gm
  modified_base 19: mod_base = gm
  modified_base 20: mod_base = OTHER; note = 2'-O-methyladenosine
  modified_base 21: mod_base = um
  source 1..21: mol_type = other RNA
gcttctcagacagcattggat

SEQ ID NO: 1277 - RNA, 21 nt, synthetic construct
  modified_base 1: mod_base = gm
  modified_base 2: mod_base = gm
  modified_base 3: mod_base = cm
  modified_base 4: mod_base = OTHER; note = 2'-O-methyladenosine
  modified_base 5: mod_base = um
  modified_base 6: mod_base = um
  modified_base 7: mod_base = gm
  modified_base 8: mod_base = gm
  modified_base 9: mod_base = OTHER; note = 2'-fluoroadenosine
  modified_base 10: mod_base = OTHER; note = 2'-fluorouridine
  modified_base 11: mod_base = OTHER; note = 2'-fluorouridine
  modified_base 12: mod_base = um
  modified_base 13: mod_base = cm
  modified_base 14: mod_base = cm
  modified_base 15: mod_base = um
  modified_base 16: mod_base = OTHER; note = 2'-O-methyladenosine
  modified_base 17: mod_base = OTHER; note = 2'-O-methyladenosine
  modified_base 18: mod_base = OTHER; note = 2'-O-methyladenosine
  modified_base 19: mod_base = gm
  modified_base 20: mod_base = gm
  modified_base 21: mod_base = um
  source 1..21: mol_type = other RNA
ggcattggatttcctaaaggt

SEQ ID NO: 1278 - RNA, 21 nt, synthetic construct
  modified_base 1: mod_base = cm
  modified_base 2: mod_base = OTHER; note = 2'-O-methyladenosine
  modified_base 3: mod_base = um
  modified_base 4: mod_base = um
  modified_base 5: mod_base = gm
  modified_base 6: mod_base = gm
  modified_base 7: mod_base = OTHER; note = 2'-O-methyladenosine
  modified_base 8: mod_base = um
  modified_base 9: mod_base = OTHER; note = 2'-fluorouridine
  modified_base 10: mod_base = OTHER; note = 2'-fluorouridine
  modified_base 11: mod_base = OTHER; note = 2'-fluorocytidine
  modified_base 12: mod_base = cm
  modified_base 13: mod_base = um
  modified_base 14: mod_base = OTHER; note = 2'-O-methyladenosine
  modified_base 15: mod_base = OTHER; note = 2'-O-methyladenosine
  modified_base 16: mod_base = OTHER; note = 2'-O-methyladenosine
  modified_base 17: mod_base = gm
  modified_base 18: mod_base = gm
  modified_base 19: mod_base = um
  modified_base 20: mod_base = OTHER; note = 2'-O-methylinosine
  modified_base 21: mod_base = OTHER; note = 2'-O-methyladenosine
  source 1..21: mol_type = other RNA
cattggatttcctaaaggtna

SEQ ID NO: 1279 - RNA, 21 nt, synthetic construct
  modified_base 1: mod_base = cm
  modified_base 2: mod_base = OTHER; note = 2'-O-methyladenosine
  modified_base 3: mod_base = um
  modified_base 4: mod_base = gm
  modified_base 5: mod_base = um
  modified_base 6: mod_base = cm
  modified_base 7: mod_base = OTHER; note = 2'-O-methyladenosine
  modified_base 8: mod_base = gm
  modified_base 9: mod_base = OTHER; note = 2'-fluorouridine
  modified_base 10: mod_base = OTHER; note = 2'-fluorouridine
  modified_base 11: mod_base = OTHER; note = 2'-fluoroguanosine
  modified_base 12: mod_base = um
  modified_base 13: mod_base = um
  modified_base 14: mod_base = um
  modified_base 15: mod_base = OTHER; note = 2'-O-methyladenosine
  modified_base 16: mod_base = OTHER; note = 2'-O-methyladenosine
  modified_base 17: mod_base = OTHER; note = 2'-O-methyladenosine
  modified_base 18: mod_base = OTHER; note = 2'-O-methyladenosine
  modified_base 19: mod_base = cm
  modified_base 20: mod_base = cm
  modified_base 21: mod_base = OTHER; note = 2'-O-methyladenosine
  source 1..21: mol_type = other RNA
catgtcagttgtttaaaacca

SEQ ID NO: 1280 - RNA, 21 nt, synthetic construct
  modified_base 1: mod_base = gm
  modified_base 2: mod_base = um
  modified_base 3: mod_base = OTHER; note = 2'-O-methyladenosine
  modified_base 4: mod_base = OTHER; note = 2'-O-methyladenosine
  modified_base 5: mod_base = cm
  modified_base 6: mod_base = um
  modified_base 7: mod_base = cm
  modified_base 8: mod_base = um
  modified_base 9: mod_base = OTHER; note = 2'-fluoroadenosine
  modified_base 10: mod_base = OTHER; note = 2'-fluoroadenosine
  modified_base 11: mod_base = OTHER; note = 2'-fluoroguanosine
  modified_base 12: mod_base = OTHER; note = 2'-O-methyladenosine
  modified_base 13: mod_base = um
  modified_base 14: mod_base = cm
  modified_base 15: mod_base = um
  modified_base 16: mod_base = gm
  modified_base 17: mod_base = OTHER; note = 2'-O-methyladenosine
  modified_base 18: mod_base = um
  modified_base 19: mod_base = gm
  modified_base 20: mod_base = OTHER; note = 2'-O-methyladenosine
  modified_base 21: mod_base = OTHER; note = 2'-O-methyladenosine
  source 1..21: mol_type = other RNA
gtaactctaagatctgatgaa

SEQ ID NO: 1281 - RNA, 21 nt, synthetic construct
  modified_base 1: mod_base = cm
  modified_base 2: mod_base = OTHER; note = 2'-O-methyladenosine
  modified_base 3: mod_base = OTHER; note = 2'-O-methyladenosine
  modified_base 4: mod_base = cm
  modified_base 5: mod_base = um
  modified_base 6: mod_base = cm
  modified_base 7: mod_base = um
  modified_base 8: mod_base = OTHER; note = 2'-O-methyladenosine
  modified_base 9: mod_base = OTHER; note = 2'-fluoroadenosine
  modified_base 10: mod_base = OTHER; note = 2'-fluoroguanosine
  modified_base 11: mod_base = OTHER; note = 2'-fluoroadenosine
  modified_base 12: mod_base = um
  modified_base 13: mod_base = cm
  modified_base 14: mod_base = um
  modified_base 15: mod_base = gm
  modified_base 16: mod_base = OTHER; note = 2'-O-methyladenosine
  modified_base 17: mod_base = um
  modified_base 18: mod_base = gm
  modified_base 19: mod_base = OTHER; note = 2'-O-methyladenosine
  modified_base 20: mod_base = OTHER; note = 2'-O-methyladenosine
  modified_base 21: mod_base = OTHER; note = 2'-O-methyladenosine
  source 1..21: mol_type = other RNA
caactctaagatctgatgaaa

SEQ ID NO: 1282 - RNA, 21 nt, synthetic construct
  modified_base 1: mod_base = um
  modified_base 2: mod_base = gm
  modified_base 3: mod_base = gm
  modified_base 4: mod_base = gm
  modified_base 5: mod_base = OTHER; note = 2'-O-methyladenosine
  modified_base 6: mod_base = OTHER; note = 2'-O-methyladenosine
  modified_base 7: mod_base = gm
  modified_base 8: mod_base = um
  modified_base 9: mod_base = OTHER; note = 2'-fluorouridine
  modified_base 10: mod_base = OTHER; note = 2'-fluoroguanosine
  modified_base 11: mod_base = OTHER; note = 2'-fluoroadenosine
  modified_base 12: mod_base = cm
  modified_base 13: mod_base = um
  modified_base 14: mod_base = OTHER; note = 2'-O-methyladenosine
  modified_base 15: mod_base = OTHER; note = 2'-O-methyladenosine
  modified_base 16: mod_base = OTHER; note = 2'-O-methyladenosine
  modified_base 17: mod_base = cm
  modified_base 18: mod_base = um
  modified_base 19: mod_base = um
  modified_base 20: mod_base = gm
  modified_base 21: mod_base = OTHER; note = 2'-O-methyladenosine
  source 1..21: mol_type = other RNA
tgggaagttgactaaacttga

SEQ ID NO: 1283 - RNA, 21 nt, synthetic construct
  modified_base 1: mod_base = gm
  modified_base 2: mod_base = cm
  modified_base 3: mod_base = um
  modified_base 4: mod_base = gm
  modified_base 5: mod_base = um
  modified_base 6: mod_base = gm
  modified_base 7: mod_base = OTHER; note = 2'-O-methyladenosine
  modified_base 8: mod_base = OTHER; note = 2'-O-methyladenosine
  modified_base 9: mod_base = OTHER; note = 2'-fluorouridine
  modified_base 10: mod_base = OTHER; note = 2'-fluoroadenosine
  modified_base 11: mod_base = OTHER; note = 2'-fluoroadenosine
  modified_base 12: mod_base = OTHER; note = 2'-O-methyladenosine
  modified_base 13: mod_base = um
  modified_base 14: mod_base = gm
  modified_base 15: mod_base = gm
  modified_base 16: mod_base = OTHER; note = 2'-O-methyladenosine
  modified_base 17: mod_base = OTHER; note = 2'-O-methyladenosine
  modified_base 18: mod_base = gm
  modified_base 19: mod_base = cm
  modified_base 20: mod_base = um
  modified_base 21: mod_base = OTHER; note = 2'-O-methyladenosine
  source 1..21: mol_type = other RNA
gctgtgaataaatggaagcta

SEQ ID NO: 1284 - RNA, 21 nt, synthetic construct
  modified_base 1: mod_base = cm
  modified_base 2: mod_base = OTHER; note = 2'-O-methyladenosine
  modified_base 3: mod_base = gm
  modified_base 4: mod_base = gm
  modified_base 5: mod_base = um
  modified_base 6: mod_base = um
  modified_base 7: mod_base = um
  modified_base 8: mod_base = um
  modified_base 9: mod_base = OTHER; note = 2'-fluoroguanosine
  modified_base 10: mod_base = OTHER; note = 2'-fluoroguanosine
  modified_base 11: mod_base = OTHER; note = 2'-fluorocytidine
  modified_base 12: mod_base = um
  modified_base 13: mod_base = um
  modified_base 14: mod_base = gm
  modified_base 15: mod_base = um
  modified_base 16: mod_base = gm
  modified_base 17: mod_base = OTHER; note = 2'-O-methyladenosine
  modified_base 18: mod_base = um
  modified_base 19: mod_base = cm
  modified_base 20: mod_base = OTHER; note = 2'-O-methyladenosine
  modified_base 21: mod_base = OTHER; note = 2'-O-methyladenosine
  source 1..21: mol_type = other RNA
caggttttggcttgtgatcaa

SEQ ID NO: 1285 - RNA, 21 nt, synthetic construct
  modified_base 1: mod_base = um
  modified_base 2: mod_base = um
  modified_base 3: mod_base = cm
  modified_base 4: mod_base = OTHER; note = 2'-O-methyladenosine
  modified_base 5: mod_base = gm
  modified_base 6: mod_base = gm
  modified_base 7: mod_base = OTHER; note = 2'-O-methyladenosine
  modified_base 8: mod_base = um
  modified_base 9: mod_base = OTHER; note = 2'-fluoroguanosine
  modified_base 10: mod_base = OTHER; note = 2'-fluorocytidine
  modified_base 11: mod_base = OTHER; note = 2'-fluoroguanosine
  modified_base 12: mod_base = OTHER; note = 2'-O-methyladenosine
  modified_base 13: mod_base = um
  modified_base 14: mod_base = gm
  modified_base 15: mod_base = um
  modified_base 16: mod_base = cm
  modified_base 17: mod_base = um
  modified_base 18: mod_base = OTHER; note = 2'-O-methyladenosine
  modified_base 19: mod_base = um
  modified_base 20: mod_base = gm
  modified_base 21: mod_base = OTHER; note = 2'-O-methyladenosine
  source 1..21: mol_type = other RNA
ttcaggatgcgatgtctatga

SEQ ID NO: 1286 - RNA, 21 nt, synthetic construct
  modified_base 1: mod_base = um
  modified_base 2: mod_base = gm
  modified_base 3: mod_base = gm
  modified_base 4: mod_base = OTHER; note = 2'-O-methyladenosine
  modified_base 5: mod_base = OTHER; note = 2'-O-methyladenosine
  modified_base 6: mod_base = OTHER; note = 2'-O-methyladenosine
  modified_base 7: mod_base = OTHER; note = 2'-O-methyladenosine
  modified_base 8: mod_base = um
  modified_base 9: mod_base = OTHER; note = 2'-fluorocytidine
  modified_base 10: mod_base = OTHER; note = 2'-fluoroadenosine
  modified_base 11: mod_base = OTHER; note = 2'-fluorocytidine
  modified_base 12: mod_base = cm
  modified_base 13: mod_base = OTHER; note = 2'-O-methyladenosine
  modified_base 14: mod_base = cm
  modified_base 15: mod_base = um
  modified_base 16: mod_base = cm
  modified_base 17: mod_base = um
  modified_base 18: mod_base = um
  modified_base 19: mod_base = um
  modified_base 20: mod_base = gm
  modified_base 21: mod_base = OTHER; note = 2'-O-methyladenosine
  source 1..21: mol_type = other RNA
tggaaaatcaccactctttga

SEQ ID NO: 1287 - RNA, 21 nt, synthetic construct
  modified_base 1: mod_base = um
  modified_base 2: mod_base = um
  modified_base 3: mod_base = gm
  modified_base 4: mod_base = OTHER; note = 2'-O-methyladenosine
  modified_base 5: mod_base = OTHER; note = 2'-O-methyladenosine
  modified_base 6: mod_base = gm
  modified_base 7: mod_base = cm
  modified_base 8: mod_base = OTHER; note = 2'-O-methyladenosine
  modified_base 9: mod_base = OTHER; note = 2'-fluorouridine
  modified_base 10: mod_base = OTHER; note = 2'-fluoroguanosine
  modified_base 11: mod_base = OTHER; note = 2'-fluoroguanosine
  modified_base 12: mod_base = um
  modified_base 13: mod_base = gm
  modified_base 14: mod_base = um
  modified_base 15: mod_base = um
  modified_base 16: mod_base = um
  modified_base 17: mod_base = cm
  modified_base 18: mod_base = OTHER; note = 2'-O-methyladenosine
  modified_base 19: mod_base = gm
  modified_base 20: mod_base = OTHER; note = 2'-O-methyladenosine
  modified_base 21: mod_base = OTHER; note = 2'-O-methyladenosine
  source 1..21: mol_type = other RNA
ttgaagcatggtgtttcagaa

SEQ ID NO: 1288 - RNA, 21 nt, synthetic construct
  modified_base 1: mod_base = OTHER; note = 2'-O-methyladenosine
  modified_base 2: mod_base = OTHER; note = 2'-O-methyladenosine
  modified_base 3: mod_base = um
  modified_base 4: mod_base = gm
  modified_base 5: mod_base = OTHER; note = 2'-O-methyladenosine
  modified_base 6: mod_base = cm
  modified_base 7: mod_base = OTHER; note = 2'-O-methyladenosine
  modified_base 8: mod_base = OTHER; note = 2'-O-methyladenosine
  modified_base 9: mod_base = OTHER; note = 2'-fluoroguanosine
  modified_base 10: mod_base = OTHER; note = 2'-fluoroadenosine
  modified_base 11: mod_base = OTHER; note = 2'-fluorocytidine
  modified_base 12: mod_base = OTHER; note = 2'-O-methyladenosine
  modified_base 13: mod_base = gm
  modified_base 14: mod_base = gm
  modified_base 15: mod_base = OTHER; note = 2'-O-methyladenosine
  modified_base 16: mod_base = um
  modified_base 17: mod_base = um
  modified_base 18: mod_base = cm
  modified_base 19: mod_base = um
  modified_base 20: mod_base = gm
  modified_base 21: mod_base = OTHER; note = 2'-O-methyladenosine
  source 1..21: mol_type = other RNA
aatgacaagacaggattctga

SEQ ID NO: 1289 - RNA, 21 nt, synthetic construct
  modified_base 1: mod_base = cm
  modified_base 2: mod_base = um
  modified_base 3: mod_base = gm
  modified_base 4: mod_base = cm
  modified_base 5: mod_base = um
  modified_base 6: mod_base = um
  modified_base 7: mod_base = cm
  modified_base 8: mod_base = um
  modified_base 9: mod_base = OTHER; note = 2'-fluorocytidine
  modified_base 10: mod_base = OTHER; note = 2'-fluoroadenosine
  modified_base 11: mod_base = OTHER; note = 2'-fluoroguanosine
  modified_base 12: mod_base = OTHER; note = 2'-O-methyladenosine
  modified_base 13: mod_base = cm
  modified_base 14: mod_base = OTHER; note = 2'-O-methyladenosine
  modified_base 15: mod_base = gm
  modified_base 16: mod_base = cm
  modified_base 17: mod_base = OTHER; note = 2'-O-methyladenosine
  modified_base 18: mod_base = um
  modified_base 19: mod_base = um
  modified_base 20: mod_base = gm
  modified_base 21: mod_base = OTHER; note = 2'-O-methyladenosine
  source 1..21: mol_type = other RNA
ctgcttctcagacagcattga

SEQ ID NO: 1290 - RNA, 21 nt, synthetic construct
  modified_base 1: mod_base = cm
  modified_base 2: mod_base = um
  modified_base 3: mod_base = OTHER; note = 2'-O-methyladenosine
  modified_base 4: mod_base = cm
  modified_base 5: mod_base = um
  modified_base 6: mod_base = gm
  modified_base 7: mod_base = OTHER; note = 2'-O-methyladenosine
  modified_base 8: mod_base = OTHER; note = 2'-O-methyladenosine
  modified_base 9: mod_base = OTHER; note = 2'-fluoroadenosine
  modified_base 10: mod_base = OTHER; note = 2'-fluoroadenosine
  modified_base 11: mod_base = OTHER; note = 2'-fluorocytidine
  modified_base 12: mod_base = cm
  modified_base 13: mod_base = um
  modified_base 14: mod_base = um
  modified_base 15: mod_base = um
  modified_base 16: mod_base = OTHER; note = 2'-O-methyladenosine
  modified_base 17: mod_base = OTHER; note = 2'-O-methyladenosine
  modified_base 18: mod_base = OTHER; note = 2'-O-methyladenosine
  modified_base 19: mod_base = gm
  modified_base 20: mod_base = gm
  modified_base 21: mod_base = OTHER; note = 2'-O-methyladenosine
  source 1..21: mol_type = other RNA
ctactgaaaacctttaaagga

SEQ ID NO: 1291 - RNA, 21 nt, synthetic construct
  modified_base 1: mod_base = OTHER; note = 2'-O-methyladenosine
  modified_base 2: mod_base = cm
  modified_base 3: mod_base = um
  modified_base 4: mod_base = cm
  modified_base 5: mod_base = um
  modified_base 6: mod_base = OTHER; note = 2'-O-methyladenosine
  modified_base 7: mod_base = OTHER; note = 2'-O-methyladenosine
  modified_base 8: mod_base = gm
  modified_base 9: mod_base = OTHER; note = 2'-fluoroadenosine
  modified_base 10: mod_base = OTHER; note = 2'-fluorouridine
  modified_base 11: mod_base = OTHER; note = 2'-fluorocytidine
  modified_base 12: mod_base = um
  modified_base 13: mod_base = gm
  modified_base 14: mod_base = OTHER; note = 2'-O-methyladenosine
  modified_base 15: mod_base = um
  modified_base 16: mod_base = gm
  modified_base 17: mod_base = OTHER; note = 2'-O-methyladenosine
  modified_base 18: mod_base = OTHER; note = 2'-O-methyladenosine
  modified_base 19: mod_base = gm
  modified_base 20: mod_base = um
  modified_base 21: mod_base = OTHER; note = 2'-O-methyladenosine
  source 1..21: mol_type = other RNA
actctaagatctgatgaagta

SEQ ID NO: 1292 - RNA, 21 nt, synthetic construct
  modified_base 1: mod_base = um
  modified_base 2: mod_base = um
  modified_base 3: mod_base = gm
  modified_base 4: mod_base = gm
  modified_base 5: mod_base = gm
  modified_base 6: mod_base = OTHER; note = 2'-O-methyladenosine
  modified_base 7: mod_base = OTHER; note = 2'-O-methyladenosine
  modified_base 8: mod_base = gm
  modified_base 9: mod_base = OTHER; note = 2'-fluorouridine
  modified_base 10: mod_base = OTHER; note = 2'-fluorouridine
  modified_base 11: mod_base = OTHER; note = 2'-fluoroguanosine
  modified_base 12: mod_base = OTHER; note = 2'-O-methyladenosine
  modified_base 13: mod_base = cm
  modified_base 14: mod_base = um
  modified_base 15: mod_base = OTHER; note = 2'-O-methyladenosine
  modified_base 16: mod_base = OTHER; note = 2'-O-methyladenosine
  modified_base 17: mod_base = OTHER; note = 2'-O-methyladenosine
  modified_base 18: mod_base = cm
  modified_base 19: mod_base = um
  modified_base 20: mod_base = um
  modified_base 21: mod_base = OTHER; note = 2'-O-methyladenosine
  source 1..21: mol_type = other RNA
ttgggaagttgactaaactta

SEQ ID NO: 1293 - RNA, 21 nt, synthetic construct
  modified_base 1: mod_base = cm
  modified_base 2: mod_base = um
  modified_base 3: mod_base = gm
  modified_base 4: mod_base = cm
  modified_base 5: mod_base = um
  modified_base 6: mod_base = um
  modified_base 7: mod_base = cm
  modified_base 8: mod_base = um
  modified_base 9: mod_base = OTHER; note = 2'-fluorocytidine
  modified_base 10: mod_base = OTHER; note = 2'-fluoroadenosine
  modified_base 11: mod_base = OTHER; note = 2'-fluoroguanosine
  modified_base 12: mod_base = OTHER; note = 2'-O-methyladenosine
  modified_base 13: mod_base = cm
  modified_base 14: mod_base = OTHER; note = 2'-O-methyladenosine
  modified_base 15: mod_base = gm
  modified_base 16: mod_base = um
  modified_base 17: mod_base = OTHER; note = 2'-O-methyladenosine
  modified_base 18: mod_base = um
  modified_base 19: mod_base = um
  modified_base 20: mod_base = gm
  modified_base 21: mod_base = OTHER; note = 2'-O-methyladenosine
  source 1..21: mol_type = other RNA
ctgcttctcagacagtattga

SEQ ID NO: 1294 - RNA, 21 nt, synthetic construct
  modified_base 1: mod_base = OTHER; note = 2'-O-methyladenosine
  modified_base 2: mod_base = cm
  modified_base 3: mod_base = um
  modified_base 4: mod_base = cm
  modified_base 5: mod_base = um
  modified_base 6: mod_base = cm
  modified_base 7: mod_base = OTHER; note = 2'-O-methyladenosine
  modified_base 8: mod_base = gm
  modified_base 9: mod_base = OTHER; note = 2'-fluorouridine
  modified_base 10: mod_base = OTHER; note = 2'-fluoroguanosine
  modified_base 11: mod_base = OTHER; note = 2'-fluorocytidine
  modified_base 12: mod_base = OTHER; note = 2'-O-methyladenosine
  modified_base 13: mod_base = gm
  modified_base 14: mod_base = cm
  modified_base 15: mod_base = cm
  modified_base 16: mod_base = um
  modified_base 17: mod_base = OTHER; note = 2'-O-methyladenosine
  modified_base 18: mod_base = cm
  modified_base 19: mod_base = OTHER; note = 2'-O-methyladenosine
  modified_base 20: mod_base = cm
  modified_base 21: mod_base = OTHER; note = 2'-O-methyladenosine
  source 1..21: mol_type = other RNA
actctcagtgcagcctacaca

SEQ ID NO: 1295 - RNA, 21 nt, synthetic construct
  modified_base 1: mod_base = cm
  modified_base 2: mod_base = um
  modified_base 3: mod_base = cm
  modified_base 4: mod_base = um
  modified_base 5: mod_base = cm
  modified_base 6: mod_base = OTHER; note = 2'-O-methyladenosine
  modified_base 7: mod_base = gm
  modified_base 8: mod_base = um
  modified_base 9: mod_base = OTHER; note = 2'-fluoroguanosine
  modified_base 10: mod_base = OTHER; note = 2'-fluorocytidine
  modified_base 11: mod_base = OTHER; note = 2'-fluoroadenosine
  modified_base 12: mod_base = gm
  modified_base 13: mod_base = cm
  modified_base 14: mod_base = cm
  modified_base 15: mod_base = um
  modified_base 16: mod_base = OTHER; note = 2'-O-methyladenosine
  modified_base 17: mod_base = cm
  modified_base 18: mod_base = OTHER; note = 2'-O-methyladenosine
  modified_base 19: mod_base = cm
  modified_base 20: mod_base = OTHER; note = 2'-O-methyladenosine
  modified_base 21: mod_base = OTHER; note = 2'-O-methyladenosine
  source 1..21: mol_type = other RNA
ctctcagtgcagcctacacaa

SEQ ID NO: 1296 - RNA, 21 nt, synthetic construct
  modified_base 1: mod_base = um
  modified_base 2: mod_base = cm
  modified_base 3: mod_base = OTHER; note = 2'-O-methyladenosine
  modified_base 4: mod_base = gm
  modified_base 5: mod_base = um
  modified_base 6: mod_base = gm
  modified_base 7: mod_base = cm
  modified_base 8: mod_base = OTHER; note = 2'-O-methyladenosine
  modified_base 9: mod_base = OTHER; note = 2'-fluoroguanosine
  modified_base 10: mod_base = OTHER; note = 2'-fluorocytidine
  modified_base 11: mod_base = OTHER; note = 2'-fluorocytidine
  modified_base 12: mod_base = um
  modified_base 13: mod_base = OTHER; note = 2'-O-methyladenosine
  modified_base 14: mod_base = cm
  modified_base 15: mod_base = OTHER; note = 2'-O-methyladenosine
  modified_base 16: mod_base = cm
  modified_base 17: mod_base = OTHER; note = 2'-O-methyladenosine
  modified_base 18: mod_base = OTHER; note = 2'-O-methyladenosine
  modified_base 19: mod_base = OTHER; note = 2'-O-methyladenosine
  modified_base 20: mod_base = gm
  modified_base 21: mod_base = OTHER; note = 2'-O-methyladenosine
  source 1..21: mol_type = other RNA
tcagtgcagcctacacaaaga

SEQ ID NO: 1297 - RNA, 21 nt, synthetic construct
  modified_base 1: mod_base = OTHER; note = 2'-O-methyladenosine
  modified_base 2: mod_base = gm
  modified_base 3: mod_base = um
  modified_base 4: mod_base = gm
  modified_base 5: mod_base = cm
  modified_base 6: mod_base = OTHER; note = 2'-O-methyladenosine
  modified_base 7: mod_base = gm
  modified_base 8: mod_base = cm
  modified_base 9: mod_base = OTHER; note = 2'-fluorocytidine
  modified_base 10: mod_base = OTHER; note = 2'-fluorouridine
  modified_base 11: mod_base = OTHER; note = 2'-fluoroadenosine
  modified_base 12: mod_base = cm
  modified_base 13: mod_base = OTHER; note = 2'-O-methyladenosine
  modified_base 14: mod_base = cm
  modified_base 15: mod_base = OTHER; note = 2'-O-methyladenosine
  modified_base 16: mod_base = OTHER; note = 2'-O-methyladenosine
  modified_base 17: mod_base = OTHER; note = 2'-O-methyladenosine
  modified_base 18: mod_base = gm
  modified_base 19: mod_base = gm
  modified_base 20: mod_base = OTHER; note = 2'-O-methyladenosine
  modified_base 21: mod_base = OTHER; note = 2'-O-methyladenosine
  source 1..21: mol_type = other RNA
agtgcagcctacacaaaggaa

SEQ ID NO: 1298 - RNA, 21 nt, synthetic construct
  modified_base 1: mod_base = um
  modified_base 2: mod_base = OTHER; note = 2'-O-methyladenosine
  modified_base 3: mod_base = cm
  modified_base 4: mod_base = cm
  modified_base 5: mod_base = gm
  modified_base 6: mod_base = cm
  modified_base 7: mod_base = cm
  modified_base 8: mod_base = um
  modified_base 9: mod_base = OTHER; note = 2'-fluoroguanosine
  modified_base 10: mod_base = OTHER; note = 2'-fluoroguanosine
  modified_base 11: mod_base = OTHER; note = 2'-fluorouridine
  modified_base 12: mod_base = gm
  modified_base 13: mod_base = cm
  modified_base 14: mod_base = OTHER; note = 2'-O-methyladenosine
  modified_base 15: mod_base = cm
  modified_base 16: mod_base = um
  modified_base 17: mod_base = um
  modified_base 18: mod_base = cm
  modified_base 19: mod_base = gm
  modified_base 20: mod_base = OTHER; note = 2'-O-methyladenosine
  modified_base 21: mod_base = OTHER; note = 2'-O-methyladenosine
  source 1..21: mol_type = other RNA
taccgcctggtgcacttcgaa

SEQ ID NO: 1299 - RNA, 21 nt, synthetic construct
  modified_base 1: mod_base = OTHER; note = 2'-O-methyladenosine
  modified_base 2: mod_base = cm
  modified_base 3: mod_base = cm
  modified_base 4: mod_base = gm
  modified_base 5: mod_base = cm
  modified_base 6: mod_base = cm
  modified_base 7: mod_base = um
  modified_base 8: mod_base = gm
  modified_base 9: mod_base = OTHER; note = 2'-fluoroguanosine
  modified_base 10: mod_base = OTHER; note = 2'-fluorouridine
  modified_base 11: mod_base = OTHER; note = 2'-fluoroguanosine
  modified_base 12: mod_base = cm
  modified_base 13: mod_base = OTHER; note = 2'-O-methyladenosine
  modified_base 14: mod_base = cm
  modified_base 15: mod_base = um
  modified_base 16: mod_base = um
  modified_base 17: mod_base = cm
  modified_base 18: mod_base = gm
  modified_base 19: mod_base = OTHER; note = 2'-O-methyladenosine
  modified_base 20: mod_base = gm
  modified_base 21: mod_base = OTHER; note = 2'-O-methyladenosine
  source 1..21: mol_type = other RNA
accgcctggtgcacttcgaga

SEQ ID NO: 1300 - RNA, 21 nt, synthetic construct
  modified_base 1: mod_base = cm
  modified_base 2: mod_base = cm
  modified_base 3: mod_base = gm
  modified_base 4: mod_base = cm
  modified_base 5: mod_base = cm
  modified_base 6: mod_base = um
  modified_base 7: mod_base = gm
  modified_base 8: mod_base = gm
  modified_base 9: mod_base = OTHER; note = 2'-fluorouridine
  modified_base 10: mod_base = OTHER; note = 2'-fluoroguanosine
  modified_base 11: mod_base = OTHER; note = 2'-fluorocytidine
  modified_base 12: mod_base = OTHER; note = 2'-O-methyladenosine
  modified_base 13: mod_base = cm
  modified_base 14: mod_base = um
  modified_base 15: mod_base = um
  modified_base 16: mod_base = cm
  modified_base 17: mod_base = gm
  modified_base 18: mod_base = OTHER; note = 2'-O-methyladenosine
  modified_base 19: mod_base = gm
  modified_base 20: mod_base = cm
  modified_base 21: mod_base = OTHER; note = 2'-O-methyladenosine
  source 1..21: mol_type = other RNA
ccgcctggtgcacttcgagca

SEQ ID NO: 1301 - RNA, 21 nt, synthetic construct
  modified_base 1: mod_base = cm
  modified_base 2: mod_base = gm
  modified_base 3: mod_base = cm
  modified_base 4: mod_base = cm
  modified_base 5: mod_base = um
  modified_base 6: mod_base = gm
  modified_base 7: mod_base = gm
  modified_base 8: mod_base = um
  modified_base 9: mod_base = OTHER; note = 2'-fluoroguanosine
  modified_base 10: mod_base = OTHER; note = 2'-fluorocytidine
  modified_base 11: mod_base = OTHER; note = 2'-fluoroadenosine
  modified_base 12: mod_base = cm
  modified_base 13: mod_base = um
  modified_base 14: mod_base = um
  modified_base 15: mod_base = cm
  modified_base 16: mod_base = gm
  modified_base 17: mod_base = OTHER; note = 2'-O-methyladenosine
  modified_base 18: mod_base = gm
  modified_base 19: mod_base = cm
  modified_base 20: mod_base = cm
  modified_base 21: mod_base = um
  source 1..21: mol_type = other RNA
cgcctggtgcacttcgagcct

SEQ ID NO: 1302 - RNA, 21 nt, synthetic construct
  modified_base 1: mod_base = cm
  modified_base 2: mod_base = gm
  modified_base 3: mod_base = cm
  modified_base 4: mod_base = um
  modified_base 5: mod_base = gm
  modified_base 6: mod_base = gm
  modified_base 7: mod_base = OTHER; note = 2'-O-methyladenosine
  modified_base 8: mod_base = OTHER; note = 2'-O-methyladenosine
  modified_base 9: mod_base = OTHER; note = 2'-fluoroadenosine
  modified_base 10: mod_base = OTHER; note = 2'-fluorocytidine
  modified_base 11: mod_base = OTHER; note = 2'-fluoroadenosine
  modified_base 12: mod_base = cm
  modified_base 13: mod_base = um
  modified_base 14: mod_base = gm
  modified_base 15: mod_base = OTHER; note = 2'-O-methyladenosine
  modified_base 16: mod_base = OTHER; note = 2'-O-methyladenosine
  modified_base 17: mod_base = gm
  modified_base 18: mod_base = OTHER; note = 2'-O-methyladenosine
  modified_base 19: mod_base = gm
  modified_base 20: mod_base = um
  modified_base 21: mod_base = um
  source 1..21: mol_type = other RNA
cgctggaaacactgaagagtt

SEQ ID NO: 1303 - RNA, 21 nt, synthetic construct
  modified_base 1: mod_base = OTHER; note = 2'-O-methyladenosine
  modified_base 2: mod_base = um
  modified_base 3: mod_base = cm
  modified_base 4: mod_base = OTHER; note = 2'-O-methyladenosine
  modified_base 5: mod_base = OTHER; note = 2'-O-methyladenosine
  modified_base 6: mod_base = OTHER; note = 2'-O-methyladenosine
  modified_base 7: mod_base = gm
  modified_base 8: mod_base = um
  modified_base 9: mod_base = OTHER; note = 2'-fluoroguanosine
  modified_base 10: mod_base = OTHER; note = 2'-fluoroguanosine
  modified_base 11: mod_base = OTHER; note = 2'-fluoroguanosine
  modified_base 12: mod_base = OTHER; note = 2'-O-methyladenosine
  modified_base 13: mod_base = gm
  modified_base 14: mod_base = OTHER; note = 2'-O-methyladenosine
  modified_base 15: mod_base = cm
  modified_base 16: mod_base = cm
  modified_base 17: mod_base = cm
  modified_base 18: mod_base = um
  modified_base 19: mod_base = gm
  modified_base 20: mod_base = um
  modified_base 21: mod_base = OTHER; note = 2'-O-methyladenosine
  source 1..21: mol_type = other RNA
atcaaagtgggagaccctgta

SEQ ID NO: 1304 - RNA, 21 nt, synthetic construct
  modified_base 1: mod_base = um
  modified_base 2: mod_base = cm
  modified_base 3: mod_base = OTHER; note = 2'-O-methyladenosine
  modified_base 4: mod_base = OTHER; note = 2'-O-methyladenosine
  modified_base 5: mod_base = OTHER; note = 2'-O-methyladenosine
  modified_base 6: mod_base = gm
  modified_base 7: mod_base = um
  modified_base 8: mod_base = gm
  modified_base 9: mod_base = OTHER; note = 2'-fluoroguanosine
  modified_base 10: mod_base = OTHER; note = 2'-fluoroguanosine
  modified_base 11: mod_base = OTHER; note = 2'-fluoroadenosine
  modified_base 12: mod_base = gm
  modified_base 13: mod_base = OTHER; note = 2'-O-methyladenosine
  modified_base 14: mod_base = cm
  modified_base 15: mod_base = cm
  modified_base 16: mod_base = cm
  modified_base 17: mod_base = um
  modified_base 18: mod_base = gm
  modified_base 19: mod_base = um
  modified_base 20: mod_base = gm
  modified_base 21: mod_base = um
  source 1..21: mol_type = other RNA
tcaaagtgggagaccctgtgt

SEQ ID NO: 1305 - RNA, 21 nt, synthetic construct
  modified_base 1: mod_base = OTHER; note = 2'-O-methyladenosine
  modified_base 2: mod_base = OTHER; note = 2'-O-methyladenosine
  modified_base 3: mod_base = gm
  modified_base 4: mod_base = um
  modified_base 5: mod_base = gm
  modified_base 6: mod_base = gm
  modified_base 7: mod_base = gm
  modified_base 8: mod_base = OTHER; note = 2'-O-methyladenosine
  modified_base 9: mod_base = OTHER; note = 2'-fluoroguanosine
  modified_base 10: mod_base = OTHER; note = 2'-fluoroadenosine
  modified_base 11: mod_base = OTHER; note = 2'-fluorocytidine
  modified_base 12: mod_base = cm
  modified_base 13: mod_base = cm
  modified_base 14: mod_base = um
  modified_base 15: mod_base = gm
  modified_base 16: mod_base = um
  modified_base 17: mod_base = gm
  modified_base 18: mod_base = um
  modified_base 19: mod_base = OTHER; note = 2'-O-methyladenosine
  modified_base 20: mod_base = cm
  modified_base 21: mod_base = OTHER; note = 2'-O-methyladenosine
  source 1..21: mol_type = other RNA
aagtgggagaccctgtgtaca

SEQ ID NO: 1306 - RNA, 21 nt, synthetic construct
  modified_base 1: mod_base = OTHER; note = 2'-O-methyladenosine
  modified_base 2: mod_base = gm
  modified_base 3: mod_base = um
  modified_base 4: mod_base = gm
  modified_base 5: mod_base = gm
  modified_base 6: mod_base = gm
  modified_base 7: mod_base = OTHER; note = 2'-O-methyladenosine
  modified_base 8: mod_base = gm
  modified_base 9: mod_base = OTHER; note = 2'-fluoroadenosine
  modified_base 10: mod_base = OTHER; note = 2'-fluorocytidine
  modified_base 11: mod_base = OTHER; note = 2'-fluorocytidine
  modified_base 12: mod_base = cm
  modified_base 13: mod_base = um
  modified_base 14: mod_base = gm
  modified_base 15: mod_base = um
  modified_base 16: mod_base = gm
  modified_base 17: mod_base = um
  modified_base 18: mod_base = OTHER; note = 2'-O-methyladenosine
  modified_base 19: mod_base = cm
  modified_base 20: mod_base = cm
  modified_base 21: mod_base = um
  source 1..21: mol_type = other RNA
agtgggagaccctgtgtacct

SEQ ID NO: 1307 - RNA, 21 nt, synthetic construct
  modified_base 1: mod_base = gm
  modified_base 2: mod_base = um
  modified_base 3: mod_base = gm
  modified_base 4: mod_base = gm
  modified_base 5: mod_base = gm
  modified_base 6: mod_base = OTHER; note = 2'-O-methyladenosine
  modified_base 7: mod_base = gm
  modified_base 8: mod_base = OTHER; note = 2'-O-methyladenosine
  modified_base 9: mod_base = OTHER; note = 2'-fluorocytidine
  modified_base 10: mod_base = OTHER; note = 2'-fluorocytidine
  modified_base 11: mod_base = OTHER; note = 2'-fluorocytidine
  modified_base 12: mod_base = um
  modified_base 13: mod_base = gm
  modified_base 14: mod_base = um
  modified_base 15: mod_base = gm
  modified_base 16: mod_base = um
  modified_base 17: mod_base = OTHER; note = 2'-O-methyladenosine
  modified_base 18: mod_base = cm
  modified_base 19: mod_base = cm
  modified_base 20: mod_base = um
  modified_base 21: mod_base = OTHER; note = 2'-O-methyladenosine
  source 1..21: mol_type = other RNA
gtgggagaccctgtgtaccta

SEQ ID NO: 1308 - RNA, 21 nt, synthetic construct
  modified_base 1: mod_base = OTHER; note = 2'-O-methyladenosine
  modified_base 2: mod_base = um
  modified_base 3: mod_base = cm
  modified_base 4: mod_base = OTHER; note = 2'-O-methyladenosine
  modified_base 5: mod_base = OTHER; note = 2'-O-methyladenosine
  modified_base 6: mod_base = OTHER; note = 2'-O-methyladenosine
  modified_base 7: mod_base = um
  modified_base 8: mod_base = OTHER; note = 2'-O-methyladenosine
  modified_base 9: mod_base = OTHER; note = 2'-fluoroguanosine
  modified_base 10: mod_base = OTHER; note = 2'-fluorocytidine
  modified_base 11: mod_base = OTHER; note = 2'-fluoroadenosine
  modified_base 12: mod_base = gm
  modified_base 13: mod_base = OTHER; note = 2'-O-methyladenosine
  modified_base 14: mod_base = cm
  modified_base 15: mod_base = um
  modified_base 16: mod_base = um
  modified_base 17: mod_base = gm
  modified_base 18: mod_base = um
  modified_base 19: mod_base = um
  modified_base 20: mod_base = cm
  modified_base 21: mod_base = OTHER; note = 2'-O-methyladenosine
  source 1..21: mol_type = other RNA
atcaaatagcagacttgttca

SEQ ID NO: 1309 - RNA, 21 nt, synthetic construct
  modified_base 1: mod_base = cm
  modified_base 2: mod_base = um
  modified_base 3: mod_base = OTHER; note = 2'-O-methyladenosine
  modified_base 4: mod_base = gm
  modified_base 5: mod_base = OTHER; note = 2'-O-methyladenosine
  modified_base 6: mod_base = gm
  modified_base 7: mod_base = OTHER; note = 2'-O-methyladenosine
  modified_base 8: mod_base = OTHER; note = 2'-O-methyladenosine
  modified_base 9: mod_base = OTHER; note = 2'-fluoroguanosine
  modified_base 10: mod_base = OTHER; note = 2'-fluoroadenosine
  modified_base 11: mod_base = OTHER; note = 2'-fluoroadenosine
  modified_base 12: mod_base = OTHER; note = 2'-O-methyladenosine
  modified_base 13: mod_base = gm
  modified_base 14: mod_base = um
  modified_base 15: mod_base = um
  modified_base 16: mod_base = OTHER; note = 2'-O-methyladenosine
  modified_base 17: mod_base = OTHER; note = 2'-O-methyladenosine
  modified_base 18: mod_base = OTHER; note = 2'-O-methyladenosine
  modified_base 19: mod_base = gm
  modified_base 20: mod_base = cm
  modified_base 21: mod_base = OTHER; note = 2'-O-methyladenosine
  source 1..21: mol_type = other RNA
ctagagaagaaagttaaagca

SEQ ID NO: 1310 - RNA, 21 nt, synthetic construct
  modified_base 1: mod_base = OTHER; note = 2'-O-methyladenosine
  modified_base 2: mod_base = gm
  modified_base 3: mod_base = OTHER; note = 2'-O-methyladenosine
  modified_base 4: mod_base = gm
  modified_base 5: mod_base = OTHER; note = 2'-O-methyladenosine
  modified_base 6: mod_base = OTHER; note = 2'-O-methyladenosine
  modified_base 7: mod_base = gm
  modified_base 8: mod_base = OTHER; note = 2'-O-methyladenosine
  modified_base 9: mod_base = OTHER; note = 2'-fluoroadenosine
  modified_base 10: mod_base = OTHER; note = 2'-fluoroadenosine
  modified_base 11: mod_base = OTHER; note = 2'-fluoroguanosine
  modified_base 12: mod_base = um
  modified_base 13: mod_base = um
  modified_base 14: mod_base = OTHER; note = 2'-O-methyladenosine
  modified_base 15: mod_base = OTHER; note = 2'-O-methyladenosine
  modified_base 16: mod_base = OTHER; note = 2'-O-methyladenosine
  modified_base 17: mod_base = gm
  modified_base 18: mod_base = cm
  modified_base 19: mod_base = OTHER; note = 2'-O-methyladenosine
  modified_base 20: mod_base = OTHER; note = 2'-O-methyladenosine
  modified_base 21: mod_base = OTHER; note = 2'-O-methyladenosine
  source 1..21: mol_type = other RNA
agagaagaaagttaaagcaaa

SEQ ID NO: 1311 - RNA, 21 nt, synthetic construct
  modified_base 1: mod_base = OTHER; note = 2'-O-methyladenosine
  modified_base 2: mod_base = gm
  modified_base 3: mod_base = gm
  modified_base 4: mod_base = cm
  modified_base 5: mod_base = cm
  modified_base 6: mod_base = cm
  modified_base 7: mod_base = OTHER; note = 2'-O-methyladenosine
  modified_base 8: mod_base = OTHER; note = 2'-O-methyladenosine
  modified_base 9: mod_base = OTHER; note = 2'-fluorouridine
  modified_base 10: mod_base = OTHER; note = 2'-fluoroadenosine
  modified_base 11: mod_base = OTHER; note = 2'-fluorouridine
  modified_base 12: mod_base = um
  modified_base 13: mod_base = gm
  modified_base 14: mod_base = um
  modified_base 15: mod_base = OTHER; note = 2'-O-methyladenosine
  modified_base 16: mod_base = OTHER; note = 2'-O-methyladenosine
  modified_base 17: mod_base = um
  modified_base 18: mod_base = um
  modified_base 19: mod_base = um
  modified_base 20: mod_base = cm
  modified_base 21: mod_base = OTHER; note = 2'-O-methyladenosine
  source 1..21: mol_type = other RNA
aggcccaatattgtaatttca

SEQ ID NO: 1312 - RNA, 21 nt, synthetic construct
  modified_base 1: mod_base = gm
  modified_base 2: mod_base = OTHER; note = 2'-O-methyladenosine
  modified_base 3: mod_base = cm
  modified_base 4: mod_base = cm
  modified_base 5: mod_base = cm
  modified_base 6: mod_base = um
  modified_base 7: mod_base = um
  modified_base 8: mod_base = cm
  modified_base 9: mod_base = OTHER; note = 2'-fluoroadenosine
  modified_base 10: mod_base = OTHER; note = 2'-fluoroguanosine
  modified_base 11: mod_base = OTHER; note = 2'-fluoroadenosine
  modified_base 12: mod_base = OTHER; note = 2'-O-methyladenosine
  modified_base 13: mod_base = cm
  modified_base 14: mod_base = gm
  modified_base 15: mod_base = OTHER; note = 2'-O-methyladenosine
  modified_base 16: mod_base = OTHER; note = 2'-O-methyladenosine
  modified_base 17: mod_base = OTHER; note = 2'-O-methyladenosine
  modified_base 18: mod_base = gm
  modified_base 19: mod_base = um
  modified_base 20: mod_base = um
  modified_base 21: mod_base = OTHER; note = 2'-O-methyladenosine
  source 1..21: mol_type = other RNA
gacccttcagaacgaaagtta

SEQ ID NO: 1313 - RNA, 21 nt, synthetic construct
  modified_base 1: mod_base = um
  modified_base 2: mod_base = um
  modified_base 3: mod_base = cm
  modified_base 4: mod_base = OTHER; note = 2'-O-methyladenosine
  modified_base 5: mod_base = gm
  modified_base 6: mod_base = OTHER; note = 2'-O-methyladenosine
  modified_base 7: mod_base = OTHER; note = 2'-O-methyladenosine
  modified_base 8: mod_base = cm
  modified_base 9: mod_base = OTHER; note = 2'-fluoroguanosine
  modified_base 10: mod_base = OTHER; note = 2'-fluoroadenosine
  modified_base 11: mod_base = OTHER; note = 2'-fluoroadenosine
  modified_base 12: mod_base = OTHER; note = 2'-O-methyladenosine
  modified_base 13: mod_base = gm
  modified_base 14: mod_base = um
  modified_base 15: mod_base = um
  modified_base 16: mod_base = OTHER; note = 2'-O-methyladenosine
  modified_base 17: mod_base = um
  modified_base 18: mod_base = OTHER; note = 2'-O-methyladenosine
  modified_base 19: mod_base = um
  modified_base 20: mod_base = gm
  modified_base 21: mod_base = OTHER; note = 2'-O-methyladenosine
  source 1..21: mol_type = other RNA
ttcagaacgaaagttatatga

SEQ ID NO: 1314 - RNA, 21 nt, synthetic construct
  modified_base 1: mod_base = cm
  modified_base 2: mod_base = cm
  modified_base 3: mod_base = cm
  modified_base 4: mod_base = gm
  modified_base 5: mod_base = um
  modified_base 6: mod_base = um
  modified_base 7: mod_base = um
  modified_base 8: mod_base = OTHER; note = 2'-O-methyladenosine
  modified_base 9: mod_base = OTHER; note = 2'-fluoroadenosine
  modified_base 10: mod_base = OTHER; note = 2'-fluorocytidine
  modified_base 11: mod_base = OTHER; note = 2'-fluorouridine
  modified_base 12: mod_base = gm
  modified_base 13: mod_base = OTHER; note = 2'-O-methyladenosine
  modified_base 14: mod_base = um
  modified_base 15: mod_base = um
  modified_base 16: mod_base = OTHER; note = 2'-O-methyladenosine
  modified_base 17: mod_base = um
  modified_base 18: mod_base = gm
  modified_base 19: mod_base = gm
  modified_base 20: mod_base = OTHER; note = 2'-O-methyladenosine
  modified_base 21: mod_base = OTHER; note = 2'-O-methyladenosine
  source 1..21: mol_type = other RNA
cccgtttaactgattatggaa

SEQ ID NO: 1315 - RNA, 21 nt, synthetic construct
  modified_base 1: mod_base = OTHER; note = 2'-O-methyladenosine
  modified_base 2: mod_base = gm
  modified_base 3: mod_base = OTHER; note = 2'-O-methyladenosine
  modified_base 4: mod_base = cm
  modified_base 5: mod_base = OTHER; note = 2'-O-methyladenosine
  modified_base 6: mod_base = gm
  modified_base 7: mod_base = cm
  modified_base 8: mod_base = OTHER; note = 2'-O-methyladenosine
  modified_base 9: mod_base = OTHER; note = 2'-fluorouridine
  modified_base 10: mod_base = OTHER; note = 2'-fluorouridine
  modified_base 11: mod_base = OTHER; note = 2'-fluoroguanosine
  modified_base 12: mod_base = gm
  modified_base 13: mod_base = OTHER; note = 2'-O-methyladenosine
  modified_base 14: mod_base = um
  modified_base 15: mod_base = um
  modified_base 16: mod_base = um
  modified_base 17: mod_base = cm
  modified_base 18: mod_base = cm
  modified_base 19: mod_base = um
  modified_base 20: mod_base = OTHER; note = 2'-O-methyladenosine
  modified_base 21: mod_base = OTHER; note = 2'-O-methyladenosine
  source 1..21: mol_type = other RNA
agacagcattggatttcctaa

SEQ ID NO: 1316 - RNA, 21 nt, synthetic construct
  modified_base 1: mod_base = um
  modified_base 2: mod_base = um
  modified_base 3: mod_base = OTHER; note = 2'-O-methyladenosine
  modified_base 4: mod_base = um
  modified_base 5: mod_base = um
  modified_base 6: mod_base = gm
  modified_base 7: mod_base = cm
  modified_base 8: mod_base = cm
  modified_base 9: mod_base = OTHER; note = 2'-fluoroadenosine
  modified_base 10: mod_base = OTHER; note = 2'-fluorouridine
  modified_base 11: mod_base = OTHER; note = 2'-fluorouridine
  modified_base 12: mod_base = um
  modified_base 13: mod_base = um
  modified_base 14: mod_base = gm
  modified_base 15: mod_base = um
  modified_base 16: mod_base = cm
  modified_base 17: mod_base = cm
  modified_base 18: mod_base = um
  modified_base 19: mod_base = um
  modified_base 20: mod_base = um
  modified_base 21: mod_base = OTHER; note = 2'-O-methyladenosine
  source 1..21: mol_type = other RNA
ttattgccattttgtccttta

SEQ ID NO: 1317 - RNA, 21 nt, synthetic construct
  modified_base 1: mod_base = um
  modified_base 2: mod_base = gm
  modified_base 3: mod_base = cm
  modified_base 4: mod_base = cm
  modified_base 5: mod_base = OTHER; note = 2'-O-methyladenosine
  modified_base 6: mod_base = um
  modified_base 7: mod_base = um
  modified_base 8: mod_base = um
  modified_base 9: mod_base = OTHER; note = 2'-fluorouridine
  modified_base 10: mod_base = OTHER; note = 2'-fluoroguanosine
  modified_base 11: mod_base = OTHER; note = 2'-fluorouridine
  modified_base 12: mod_base = cm
  modified_base 13: mod_base = cm
  modified_base 14: mod_base = um
  modified_base 15: mod_base = um
  modified_base 16: mod_base = um
  modified_base 17: mod_base = gm
  modified_base 18: mod_base = OTHER; note = 2'-O-methyladenosine
  modified_base 19: mod_base = um
  modified_base 20: mod_base = um
  modified_base 21: mod_base = OTHER; note = 2'-O-methyladenosine
  source 1..21: mol_type = other RNA
tgccattttgtcctttgatta

SEQ ID NO: 1318 - RNA, 21 nt, synthetic construct
  modified_base 1: mod_base = cm
  modified_base 2: mod_base = cm
  modified_base 3: mod_base = OTHER; note = 2'-O-methyladenosine
  modified_base 4: mod_base = cm
  modified_base 5: mod_base = um
  modified_base 6: mod_base = gm
  modified_base 7: mod_base = OTHER; note = 2'-O-methyladenosine
  modified_base 8: mod_base = OTHER; note = 2'-O-methyladenosine
  modified_base 9: mod_base = OTHER; note = 2'-fluoroadenosine
  modified_base 10: mod_base = OTHER; note = 2'-fluoroadenosine
  modified_base 11: mod_base = OTHER; note = 2'-fluorocytidine
  modified_base 12: mod_base = cm
  modified_base 13: mod_base = um
  modified_base 14: mod_base = um
  modified_base 15: mod_base = um
  modified_base 16: mod_base = OTHER; note = 2'-O-methyladenosine
  modified_base 17: mod_base = OTHER; note = 2'-O-methyladenosine
  modified_base 18: mod_base = OTHER; note = 2'-O-methyladenosine
  modified_base 19: mod_base = gm
  modified_base 20: mod_base = gm
  modified_base 21: mod_base = OTHER; note = 2'-O-methyladenosine
  source 1..21: mol_type = other RNA
ccactgaaaacctttaaagga

SEQ ID NO: 1319 - RNA, 21 nt, synthetic construct
  modified_base 1: mod_base = gm
  modified_base 2: mod_base = OTHER; note = 2'-O-methyladenosine
  modified_base 3: mod_base = um
  modified_base 4: mod_base = um
  modified_base 5: mod_base = OTHER; note = 2'-O-methyladenosine
  modified_base 6: mod_base = um
  modified_base 7: mod_base = gm
  modified_base 8: mod_base = gm
  modified_base 9: mod_base = OTHER; note = 2'-fluoroadenosine
  modified_base 10: mod_base = OTHER; note = 2'-fluoroadenosine
  modified_base 11: mod_base = OTHER; note = 2'-fluorouridine
  modified_base 12: mod_base = OTHER; note = 2'-O-methyladenosine
  modified_base 13: mod_base = gm
  modified_base 14: mod_base = um
  modified_base 15: mod_base = um
  modified_base 16: mod_base = cm
  modified_base 17: mod_base = um
  modified_base 18: mod_base = um
  modified_base 19: mod_base = um
  modified_base 20: mod_base = cm
  modified_base 21: mod_base = OTHER; note = 2'-O-methyladenosine
  source 1..21: mol_type = other RNA
gattatggaatagttctttca

SEQ ID NO: 1320 - RNA, 21 nt, synthetic construct
  modified_base 1: mod_base = gm
  modified_base 2: mod_base = um
  modified_base 3: mod_base = um
  modified_base 4: mod_base = cm
  modified_base 5: mod_base = um
  modified_base 6: mod_base = cm
  modified_base 7: mod_base = OTHER; note = 2'-O-methyladenosine
  modified_base 8: mod_base = OTHER; note = 2'-O-methyladenosine
  modified_base 9: mod_base = OTHER; note = 2'-fluoroadenosine
  modified_base 10: mod_base = OTHER; note = 2'-fluoroadenosine
  modified_base 11: mod_base = OTHER; note = 2'-fluoroadenosine
  modified_base 12: mod_base = um
  modified_base 13: mod_base = gm
  modified_base 14: mod_base = OTHER; note = 2'-O-methyladenosine
  modified_base 15: mod_base = cm
  modified_base 16: mod_base = OTHER; note = 2'-O-methyladenosine
  modified_base 17: mod_base = OTHER; note = 2'-O-methyladenosine
  modified_base 18: mod_base = cm
  modified_base 19: mod_base = OTHER; note = 2'-O-methyladenosine
  modified_base 20: mod_base = cm
  modified_base 21: mod_base = OTHER; note = 2'-O-methyladenosine
  source 1..21: mol_type = other RNA
gttctcaaaaatgacaacaca

SEQ ID NO: 1321 - RNA, 21 nt, synthetic construct
  modified_base 1: mod_base = OTHER; note = 2'-O-methyladenosine
  modified_base 2: mod_base = gm
  modified_base 3: mod_base = gm
  modified_base 4: mod_base = um
  modified_base 5: mod_base = um
  modified_base 6: mod_base = um
  modified_base 7: mod_base = um
  modified_base 8: mod_base = gm
  modified_base 9: mod_base = OTHER; note = 2'-fluoroguanosine
  modified_base 10: mod_base = OTHER; note = 2'-fluorocytidine
  modified_base 11: mod_base = OTHER; note = 2'-fluorouridine
  modified_base 12: mod_base = um
  modified_base 13: mod_base = gm
  modified_base 14: mod_base = um
  modified_base 15: mod_base = gm
  modified_base 16: mod_base = OTHER; note = 2'-O-methyladenosine
  modified_base 17: mod_base = um
  modified_base 18: mod_base = cm
  modified_base 19: mod_base = OTHER; note = 2'-O-methyladenosine
  modified_base 20: mod_base = OTHER; note = 2'-O-methyladenosine
  modified_base 21: mod_base = OTHER; note = 2'-O-methyladenosine
  source 1..21: mol_type = other RNA
aggttttggcttgtgatcaaa

SEQ ID NO: 1322 - RNA, 21 nt, synthetic construct
  modified_base 1: mod_base = gm
  modified_base 2: mod_base = gm
  modified_base 3: mod_base = um
  modified_base 4: mod_base = um
  modified_base 5: mod_base = um
  modified_base 6: mod_base = um
  modified_base 7: mod_base = gm
  modified_base 8: mod_base = gm
  modified_base 9: mod_base = OTHER; note = 2'-fluorocytidine
  modified_base 10: mod_base = OTHER; note = 2'-fluorouridine
  modified_base 11: mod_base = OTHER; note = 2'-fluorouridine
  modified_base 12: mod_base = gm
  modified_base 13: mod_base = um
  modified_base 14: mod_base = gm
  modified_base 15: mod_base = OTHER; note = 2'-O-methyladenosine
  modified_base 16: mod_base = um
  modified_base 17: mod_base = cm
  modified_base 18: mod_base = OTHER; note = 2'-O-methyladenosine
  modified_base 19: mod_base = OTHER; note = 2'-O-methyladenosine
  modified_base 20: mod_base = cm
  modified_base 21: mod_base = OTHER; note = 2'-O-methyladenosine
  source 1..21: mol_type = other RNA
ggttttggcttgtgatcaaca

SEQ ID NO: 1323 - RNA, 21 nt, synthetic construct
  modified_base 1: mod_base = gm
  modified_base 2: mod_base = OTHER; note = 2'-O-methyladenosine
  modified_base 3: mod_base = um
  modified_base 4: mod_base = um
  modified_base 5: mod_base = OTHER; note = 2'-O-methyladenosine
  modified_base 6: mod_base = um
  modified_base 7: mod_base = gm
  modified_base 8: mod_base = gm
  modified_base 9: mod_base = OTHER; note = 2'-fluoroadenosine
  modified_base 10: mod_base = OTHER; note = 2'-O-methyladenosine
  modified_base 11: mod_base = OTHER; note = 2'-fluorouridine
  modified_base 12: mod_base = OTHER; note = 2'-O-methyladenosine
  modified_base 13: mod_base = OTHER; note = 2'-fluoroguanosine
  modified_base 14: mod_base = um
  modified_base 15: mod_base = um
  modified_base 16: mod_base = cm
  modified_base 17: mod_base = um
  modified_base 18: mod_base = um
  modified_base 19: mod_base = um
  modified_base 20: mod_base = cm
  modified_base 21: mod_base = um
  source 1..21: mol_type = other RNA
gattatggaatagttctttct

SEQ ID NO: 1324 - RNA, 21 nt, synthetic construct
  modified_base 1: mod_base = gm
  modified_base 2: mod_base = OTHER; note = 2'-O-methyladenosine
  modified_base 3: mod_base = um
  modified_base 4: mod_base = um
  modified_base 5: mod_base = OTHER; note = 2'-O-methyladenosine
  modified_base 6: mod_base = um
  modified_base 7: mod_base = gm
  modified_base 8: mod_base = gm
  modified_base 9: mod_base = OTHER; note = 2'-fluoroadenosine
  modified_base 10: mod_base = OTHER; note = 2'-O-methyladenosine
  modified_base 11: mod_base = OTHER; note = 2'-fluorouridine
  modified_base 12: mod_base = OTHER; note = 2'-O-methyladenosine
  modified_base 13: mod_base = gm
  modified_base 14: mod_base = um
  modified_base 15: mod_base = um
  modified_base 16: mod_base = cm
  modified_base 17: mod_base = um
  modified_base 18: mod_base = um
  modified_base 19: mod_base = um
  modified_base 20: mod_base = cm
  modified_base 21: mod_base = um
  source 1..21: mol_type = other RNA
gattatggaatagttctttct

SEQ ID NO: 1325 - RNA, 21 nt, synthetic construct
  modified_base 1: mod_base = OTHER; note = 2'-O-methyladenosine
  modified_base 2: mod_base = um
  modified_base 3: mod_base = um
  modified_base 4: mod_base = OTHER; note = 2'-O-methyladenosine
  modified_base 5: mod_base = um
  modified_base 6: mod_base = gm
  modified_base 7: mod_base = gm
  modified_base 8: mod_base = OTHER; note = 2'-O-methyladenosine
  modified_base 9: mod_base = OTHER; note = 2'-fluoroadenosine
  modified_base 10: mod_base = OTHER; note = 2'-fluorouridine
  modified_base 11: mod_base = OTHER; note = 2'-fluoroadenosine
  modified_base 12: mod_base = gm
  modified_base 13: mod_base = um
  modified_base 14: mod_base = um
  modified_base 15: mod_base = cm
  modified_base 16: mod_base = um
  modified_base 17: mod_base = um
  modified_base 18: mod_base = um
  modified_base 19: mod_base = cm
  modified_base 20: mod_base = um
  modified_base 21: mod_base = OTHER; note = 2'-O-methyladenosine
  source 1..21: mol_type = other RNA
attatggaatagttctttcta

SEQ ID NO: 1326 - RNA, 21 nt, synthetic construct
  modified_base 1: mod_base = OTHER; note = 2'-O-methyladenosine
  modified_base 2: mod_base = cm
  modified_base 3: mod_base = um
  modified_base 4: mod_base = OTHER; note = 2'-O-methyladenosine
  modified_base 5: mod_base = um
  modified_base 6: mod_base = gm
  modified_base 7: mod_base = gm
  modified_base 8: mod_base = OTHER; note = 2'-O-methyladenosine
  modified_base 9: mod_base = OTHER; note = 2'-fluoroadenosine
  modified_base 10: mod_base = OTHER; note = 2'-fluorouridine
  modified_base 11: mod_base = OTHER; note = 2'-fluoroadenosine
  modified_base 12: mod_base = gm
  modified_base 13: mod_base = um
  modified_base 14: mod_base = um
  modified_base 15: mod_base = cm
  modified_base 16: mod_base = um
  modified_base 17: mod_base = um
  modified_base 18: mod_base = um
  modified_base 19: mod_base = cm
  modified_base 20: mod_base = um
  modified_base 21: mod_base = OTHER; note = 2'-O-methyladenosine
  source 1..21: mol_type = other RNA
actatggaatagttctttcta

SEQ ID NO: 1327 - RNA, 21 nt, synthetic construct
  modified_base 1: mod_base = gm
  modified_base 2: mod_base = cm
  modified_base 3: mod_base = um
  modified_base 4: mod_base = OTHER; note = 2'-O-methyladenosine
  modified_base 5: mod_base = um
  modified_base 6: mod_base = gm
  modified_base 7: mod_base = gm
  modified_base 8: mod_base = OTHER; note = 2'-O-methyladenosine
  modified_base 9: mod_base = OTHER; note = 2'-fluoroadenosine
  modified_base 10: mod_base = OTHER; note = 2'-fluorouridine
  modified_base 11: mod_base = OTHER; note = 2'-fluoroadenosine
  modified_base 12: mod_base = gm
  modified_base 13: mod_base = um
  modified_base 14: mod_base = um
  modified_base 15: mod_base = cm
  modified_base 16: mod_base = um
  modified_base 17: mod_base = um
  modified_base 18: mod_base = um
  modified_base 19: mod_base = cm
  modified_base 20: mod_base = um
  modified_base 21: mod_base = OTHER; note = 2'-O-methyladenosine
  source 1..21: mol_type = other RNA
gctatggaatagttctttcta

SEQ ID NO: 1328 - RNA, 21 nt, synthetic construct
  modified_base 1: mod_base = um
  modified_base 2: mod_base = gm
  modified_base 3: mod_base = OTHER; note = 2'-O-methyladenosine
  modified_base 4: mod_base = cm
  modified_base 5: mod_base = um
  modified_base 6: mod_base = OTHER; note = 2'-O-methyladenosine
  modified_base 7: mod_base = gm
  modified_base 8: mod_base = um
  modified_base 9: mod_base = OTHER; note = 2'-fluorouridine
  modified_base 10: mod_base = OTHER; note = 2'-fluorouridine
  modified_base 11: mod_base = OTHER; note = 2'-fluorocytidine
  modified_base 12: mod_base = OTHER; note = 2'-O-methyladenosine
  modified_base 13: mod_base = gm
  modified_base 14: mod_base = OTHER; note = 2'-O-methyladenosine
  modified_base 15: mod_base = um
  modified_base 16: mod_base = cm
  modified_base 17: mod_base = um
  modified_base 18: mod_base = um
  modified_base 19: mod_base = OTHER; note = 2'-O-methyladenosine
  modified_base 20: mod_base = cm
  modified_base 21: mod_base = um
  source 1..21: mol_type = other RNA
tgactagtttcagatcttact

SEQ ID NO: 1329 - RNA, 21 nt, synthetic construct
  modified_base 1: mod_base = um
  modified_base 2: mod_base = OTHER; note = 2'-O-methyladenosine
  modified_base 3: mod_base = gm
  modified_base 4: mod_base = um
  modified_base 5: mod_base = um
  modified_base 6: mod_base = um
  modified_base 7: mod_base = cm
  modified_base 8: mod_base = OTHER; note = 2'-O-methyladenosine
  modified_base 9: mod_base = OTHER; note = 2'-fluoroguanosine
  modified_base 10: mod_base = OTHER; note = 2'-fluoroadenosine
  modified_base 11: mod_base = OTHER; note = 2'-fluorouridine
  modified_base 12: mod_base = cm
  modified_base 13: mod_base = um
  modified_base 14: mod_base = um
  modified_base 15: mod_base = OTHER; note = 2'-O-methyladenosine
  modified_base 16: mod_base = cm
  modified_base 17: mod_base = um
  modified_base 18: mod_base = OTHER; note = 2'-O-methyladenosine
  modified_base 19: mod_base = OTHER; note = 2'-O-methyladenosine
  modified_base 20: mod_base = cm
  modified_base 21: mod_base = um
  source 1..21: mol_type = other RNA
tagtttcagatcttactaact

SEQ ID NO: 1330 - RNA, 21 nt, synthetic construct
  modified_base 1: mod_base = gm
  modified_base 2: mod_base = um
  modified_base 3: mod_base = um
  modified_base 4: mod_base = um
  modified_base 5: mod_base = cm
  modified_base 6: mod_base = OTHER; note = 2'-O-methyladenosine
  modified_base 7: mod_base = gm
  modified_base 8: mod_base = OTHER; note = 2'-O-methyladenosine
  modified_base 9: mod_base = OTHER; note = 2'-fluorouridine
  modified_base 10: mod_base = OTHER; note = 2'-fluorocytidine
  modified_base 11: mod_base = OTHER; note = 2'-fluorouridine
  modified_base 12: mod_base = um
  modified_base 13: mod_base = OTHER; note = 2'-O-methyladenosine
  modified_base 14: mod_base = cm
  modified_base 15: mod_base = um
  modified_base 16: mod_base = OTHER; note = 2'-O-methyladenosine
  modified_base 17: mod_base = OTHER; note = 2'-O-methyladenosine
  modified_base 18: mod_base = cm
  modified_base 19: mod_base = um
  modified_base 20: mod_base = um
  modified_base 21: mod_base = OTHER; note = 2'-O-methyladenosine
  source 1..21: mol_type = other RNA
gtttcagatcttactaactta

SEQ ID NO: 1331 - RNA, 21 nt, synthetic construct
  modified_base 1: mod_base = gm
  modified_base 2: mod_base = um
  modified_base 3: mod_base = gm
  modified_base 4: mod_base = cm
  modified_base 5: mod_base = OTHER; note = 2'-O-methyladenosine
  modified_base 6: mod_base = um
  modified_base 7: mod_base = gm
  modified_base 8: mod_base = um
  modified_base 9: mod_base = OTHER; note = 2'-fluoroguanosine
  modified_base 10: mod_base = OTHER; note = 2'-fluorocytidine
  modified_base 11: mod_base = OTHER; note = 2'-fluorouridine
  modified_base 12: mod_base = um
  modified_base 13: mod_base = gm
  modified_base 14: mod_base = um
  modified_base 15: mod_base = um
  modified_base 16: mod_base = um
  modified_base 17: mod_base = um
  modified_base 18: mod_base = OTHER; note = 2'-O-methyladenosine
  modified_base 19: mod_base = um
  modified_base 20: mod_base = gm
  modified_base 21: mod_base = OTHER; note = 2'-O-methyladenosine
  source 1..21: mol_type = other RNA
gtgcatgtgcttgttttatga

SEQ ID NO: 1332 - RNA, 21 nt, synthetic construct
  modified_base 1: mod_base = gm
  modified_base 2: mod_base = OTHER; note = 2'-O-methyladenosine
  modified_base 3: mod_base = gm
  modified_base 4: mod_base = OTHER; note = 2'-O-methyladenosine
  modified_base 5: mod_base = cm
  modified_base 6: mod_base = OTHER; note = 2'-O-methyladenosine
  modified_base 7: mod_base = OTHER; note = 2'-O-methyladenosine
  modified_base 8: mod_base = OTHER; note = 2'-O-methyladenosine
  modified_base 9: mod_base = OTHER; note = 2'-fluoroguanosine
  modified_base 10: mod_base = OTHER; note = 2'-fluorocytidine
  modified_base 11: mod_base = OTHER; note = 2'-fluoroguanosine
  modified_base 12: mod_base = OTHER; note = 2'-O-methyladenosine
  modified_base 13: mod_base = OTHER; note = 2'-O-methyladenosine
  modified_base 14: mod_base = gm
  modified_base 15: mod_base = um
  modified_base 16: mod_base = gm
  modified_base 17: mod_base = um
  modified_base 18: mod_base = um
  modified_base 19: mod_base = cm
  modified_base 20: mod_base = OTHER; note = 2'-O-methyladenosine
  modified_base 21: mod_base = OTHER; note = 2'-O-methyladenosine
  source 1..21: mol_type = other RNA
gagacaaagcgaagtgttcaa

SEQ ID NO: 1333 - RNA, 21 nt, synthetic construct
  modified_base 1: mod_base = um
  modified_base 2: mod_base = um
  modified_base 3: mod_base = cm
  modified_base 4: mod_base = cm
  modified_base 5: mod_base = OTHER; note = 2'-O-methyladenosine
  modified_base 6: mod_base = gm
  modified_base 7: mod_base = um
  modified_base 8: mod_base = gm
  modified_base 9: mod_base = OTHER; note = 2'-fluoroadenosine
  modified_base 10: mod_base = OTHER; note = 2'-fluorocytidine
  modified_base 11: mod_base = OTHER; note = 2'-fluorocytidine
  modified_base 12: mod_base = um
  modified_base 13: mod_base = cm
  modified_base 14: mod_base = um
  modified_base 15: mod_base = OTHER; note = 2'-O-methyladenosine
  modified_base 16: mod_base = gm
  modified_base 17: mod_base = OTHER; note = 2'-O-methyladenosine
  modified_base 18: mod_base = OTHER; note = 2'-O-methyladenosine
  modified_base 19: mod_base = um
  modified_base 20: mod_base = cm
  modified_base 21: mod_base = um
  source 1..21: mol_type = other RNA
ttccagtgacctctagaatct

SEQ ID NO: 1334 - RNA, 21 nt, synthetic construct
  modified_base 1: mod_base = gm
  modified_base 2: mod_base = OTHER; note = 2'-O-methyladenosine
  modified_base 3: mod_base = gm
  modified_base 4: mod_base = cm
  modified_base 5: mod_base = OTHER; note = 2'-O-methyladenosine
  modified_base 6: mod_base = um
  modified_base 7: mod_base = um
  modified_base 8: mod_base = um
  modified_base 9: mod_base = OTHER; note = 2'-fluoroguanosine
  modified_base 10: mod_base = OTHER; note = 2'-fluorocytidine
  modified_base 11: mod_base = OTHER; note = 2'-fluoroadenosine
  modified_base 12: mod_base = cm
  modified_base 13: mod_base = OTHER; note = 2'-O-methyladenosine
  modified_base 14: mod_base = cm
  modified_base 15: mod_base = um
  modified_base 16: mod_base = OTHER; note = 2'-O-methyladenosine
  modified_base 17: mod_base = um
  modified_base 18: mod_base = um
  modified_base 19: mod_base = cm
  modified_base 20: mod_base = cm
  modified_base 21: mod_base = OTHER; note = 2'-O-methyladenosine
  source 1..21: mol_type = other RNA
gagcatttgcacactattcca

SEQ ID NO: 1335 - RNA, 21 nt, synthetic construct
  modified_base 1: mod_base = OTHER; note = 2'-O-methyladenosine
  modified_base 2: mod_base = um
  modified_base 3: mod_base = gm
  modified_base 4: mod_base = OTHER; note = 2'-O-methyladenosine
  modified_base 5: mod_base = cm
  modified_base 6: mod_base = OTHER; note = 2'-O-methyladenosine
  modified_base 7: mod_base = gm
  modified_base 8: mod_base = OTHER; note = 2'-O-methyladenosine
  modified_base 9: mod_base = OTHER; note = 2'-fluorouridine
  modified_base 10: mod_base = OTHER; note = 2'-fluoroguanosine
  modified_base 11: mod_base = OTHER; note = 2'-fluorouridine
  modified_base 12: mod_base = um
  modified_base 13: mod_base = um
  modified_base 14: mod_base = gm
  modified_base 15: mod_base = OTHER; note = 2'-O-methyladenosine
  modified_base 16: mod_base = gm
  modified_base 17: mod_base = OTHER; note = 2'-O-methyladenosine
  modified_base 18: mod_base = um
  modified_base 19: mod_base = cm
  modified_base 20: mod_base = OTHER; note = 2'-O-methyladenosine
  modified_base 21: mod_base = OTHER; note = 2'-O-methyladenosine
  source 1..21: mol_type = other RNA
atgacagatgtttgagatcaa

SEQ ID NO: 1336 - RNA, 21 nt, synthetic construct
  modified_base 1: mod_base = um
  modified_base 2: mod_base = cm
  modified_base 3: mod_base = um
  modified_base 4: mod_base = gm
  modified_base 5: mod_base = um
  modified_base 6: mod_base = gm
  modified_base 7: mod_base = um
  modified_base 8: mod_base = gm
  modified_base 9: mod_base = OTHER; note = 2'-fluoroguanosine
  modified_base 10: mod_base = OTHER; note = 2'-fluorocytidine
  modified_base 11: mod_base = OTHER; note = 2'-fluoroadenosine
  modified_base 12: mod_base = OTHER; note = 2'-O-methyladenosine
  modified_base 13: mod_base = cm
  modified_base 14: mod_base = um
  modified_base 15: mod_base = um
  modified_base 16: mod_base = OTHER; note = 2'-O-methyladenosine
  modified_base 17: mod_base = um
  modified_base 18: mod_base = gm
  modified_base 19: mod_base = cm
  modified_base 20: mod_base = um
  modified_base 21: mod_base = OTHER; note = 2'-O-methyladenosine
  source 1..21: mol_type = other RNA
tctgtgtggcaacttatgcta

SEQ ID NO: 1337 - RNA, 21 nt, synthetic construct
  modified_base 1: mod_base = cm
  modified_base 2: mod_base = OTHER; note = 2'-O-methyladenosine
  modified_base 3: mod_base = gm
  modified_base 4: mod_base = OTHER; note = 2'-O-methyladenosine
  modified_base 5: mod_base = cm
  modified_base 6: mod_base = cm
  modified_base 7: mod_base = OTHER; note = 2'-O-methyladenosine
  modified_base 8: mod_base = gm
  modified_base 9: mod_base = OTHER; note = 2'-fluoroadenosine
  modified_base 10: mod_base = OTHER; note = 2'-fluorocytidine
  modified_base 11: mod_base = OTHER; note = 2'-fluorocytidine
  modified_base 12: mod_base = um
  modified_base 13: mod_base = um
  modified_base 14: mod_base = gm
  modified_base 15: mod_base = OTHER; note = 2'-O-methyladenosine
  modified_base 16: mod_base = um
  modified_base 17: mod_base = um
  modified_base 18: mod_base = gm
  modified_base 19: mod_base = um
  modified_base 20: mod_base = gm
  modified_base 21: mod_base = OTHER; note = 2'-O-methyladenosine
  source 1..21: mol_type = other RNA
cagaccagaccttgattgtga

SEQ ID NO: 1338 - RNA, 21 nt, synthetic construct
  modified_base 1: mod_base = OTHER; note = 2'-O-methyladenosine
  modified_base 2: mod_base = gm
  modified_base 3: mod_base = gm
  modified_base 4: mod_base = gm
  modified_base 5: mod_base = OTHER; note = 2'-O-methyladenosine
  modified_base 6: mod_base = gm
  modified_base 7: mod_base = OTHER; note = 2'-O-methyladenosine
  modified_base 8: mod_base = OTHER; note = 2'-O-methyladenosine
  modified_base 9: mod_base = OTHER; note = 2'-fluoroguanosine
  modified_base 10: mod_base = OTHER; note = 2'-fluorocytidine
  modified_base 11: mod_base = OTHER; note = 2'-fluoroadenosine
  modified_base 12: mod_base = cm
  modified_base 13: mod_base = um
  modified_base 14: mod_base = cm
  modified_base 15: mod_base = um
  modified_base 16: mod_base = cm
  modified_base 17: mod_base = um
  modified_base 18: mod_base = um
  modified_base 19: mod_base = um
  modified_base 20: mod_base = cm
  modified_base 21: mod_base = um
  source 1..21: mol_type = other RNA
agggagaagcactctctttct

SEQ ID NO: 1339 - RNA, 21 nt, synthetic construct
  modified_base 1: mod_base = gm
  modified_base 2: mod_base = OTHER; note = 2'-O-methyladenosine
  modified_base 3: mod_base = OTHER; note = 2'-O-methyladenosine
  modified_base 4: mod_base = OTHER; note = 2'-O-methyladenosine
  modified_base 5: mod_base = cm
  modified_base 6: mod_base = cm
  modified_base 7: mod_base = OTHER; note = 2'-O-methyladenosine
  modified_base 8: mod_base = OTHER; note = 2'-O-methyladenosine
  modified_base 9: mod_base = OTHER; note = 2'-fluoroadenosine
  modified_base 10: mod_base = OTHER; note = 2'-fluorocytidine
  modified_base 11: mod_base = OTHER; note = 2'-fluorouridine
  modified_base 12: mod_base = cm
  modified_base 13: mod_base = um
  modified_base 14: mod_base = cm
  modified_base 15: mod_base = um
  modified_base 16: mod_base = cm
  modified_base 17: mod_base = um
  modified_base 18: mod_base = OTHER; note = 2'-O-methyladenosine
  modified_base 19: mod_base = OTHER; note = 2'-O-methyladenosine
  modified_base 20: mod_base = cm
  modified_base 21: mod_base = OTHER; note = 2'-O-methyladenosine
  source 1..21: mol_type = other RNA
gaaaccaaactctctctaaca

SEQ ID NO: 1340 - RNA, 21 nt, synthetic construct
  modified_base 1: mod_base = OTHER; note = 2'-O-methyladenosine
  modified_base 2: mod_base = cm
  modified_base 3: mod_base = cm
  modified_base 4: mod_base = OTHER; note = 2'-O-methyladenosine
  modified_base 5: mod_base = OTHER; note = 2'-O-methyladenosine
  modified_base 6: mod_base = OTHER; note = 2'-O-methyladenosine
  modified_base 7: mod_base = cm
  modified_base 8: mod_base = um
  modified_base 9: mod_base = OTHER; note = 2'-fluorocytidine
  modified_base 10: mod_base = OTHER; note = 2'-fluorouridine
  modified_base 11: mod_base = OTHER; note = 2'-fluorocytidine
  modified_base 12: mod_base = um
  modified_base 13: mod_base = cm
  modified_base 14: mod_base = um
  modified_base 15: mod_base = OTHER; note = 2'-O-methyladenosine
  modified_base 16: mod_base = OTHER; note = 2'-O-methyladenosine
  modified_base 17: mod_base = cm
  modified_base 18: mod_base = cm
  modified_base 19: mod_base = um
  modified_base 20: mod_base = um
  modified_base 21: mod_base = OTHER; note = 2'-O-methyladenosine
  source 1..21: mol_type = other RNA
accaaactctctctaacctta

SEQ ID NO: 1341 - RNA, 21 nt, synthetic construct
  modified_base 1: mod_base = gm
  modified_base 2: mod_base = um
  modified_base 3: mod_base = gm
  modified_base 4: mod_base = OTHER; note = 2'-O-methyladenosine
  modified_base 5: mod_base = um
  modified_base 6: mod_base = gm
  modified_base 7: mod_base = um
  modified_base 8: mod_base = OTHER; note = 2'-O-methyladenosine
  modified_base 9: mod_base = OTHER; note = 2'-fluoroadenosine
  modified_base 10: mod_base = OTHER; note = 2'-fluoroguanosine
  modified_base 11: mod_base = OTHER; note = 2'-fluorouridine
  modified_base 12: mod_base = um
  modified_base 13: mod_base = OTHER; note = 2'-O-methyladenosine
  modified_base 14: mod_base = cm
  modified_base 15: mod_base = OTHER; note = 2'-O-methyladenosine
  modified_base 16: mod_base = OTHER; note = 2'-O-methyladenosine
  modified_base 17: mod_base = OTHER; note = 2'-O-methyladenosine
  modified_base 18: mod_base = OTHER; note = 2'-O-methyladenosine
  modified_base 19: mod_base = cm
  modified_base 20: mod_base = cm
  modified_base 21: mod_base = OTHER; note = 2'-O-methyladenosine
  source 1..21: mol_type = other RNA
gtgatgtaagttacaaaacca

SEQ ID NO: 1342 - RNA, 21 nt, synthetic construct
  modified_base 1: mod_base = OTHER; note = 2'-O-methyladenosine
  modified_base 2: mod_base = OTHER; note = 2'-O-methyladenosine
  modified_base 3: mod_base = cm
  modified_base 4: mod_base = cm
  modified_base 5: mod_base = OTHER; note = 2'-O-methyladenosine
  modified_base 6: mod_base = cm
  modified_base 7: mod_base = cm
  modified_base 8: mod_base = um
  modified_base 9: mod_base = OTHER; note = 2'-fluoroguanosine
  modified_base 10: mod_base = OTHER; note = 2'-fluorouridine
  modified_base 11: mod_base = OTHER; note = 2'-fluoroguanosine
  modified_base 12: mod_base = OTHER; note = 2'-O-methyladenosine
  modified_base 13: mod_base = um
  modified_base 14: mod_base = gm
  modified_base 15: mod_base = OTHER; note = 2'-O-methyladenosine
  modified_base 16: mod_base = OTHER; note = 2'-O-methyladenosine
  modified_base 17: mod_base = OTHER; note = 2'-O-methyladenosine
  modified_base 18: mod_base = gm
  modified_base 19: mod_base = um
  modified_base 20: mod_base = gm
  modified_base 21: mod_base = OTHER; note = 2'-O-methyladenosine
  source 1..21: mol_type = other RNA
aaccacctgtgatgaaagtga

SEQ ID NO: 1343 - RNA, 21 nt, synthetic construct
  modified_base 1: mod_base = um
  modified_base 2: mod_base = gm
  modified_base 3: mod_base = OTHER; note = 2'-O-methyladenosine
  modified_base 4: mod_base = cm
  modified_base 5: mod_base = um
  modified_base 6: mod_base = gm
  modified_base 7: mod_base = gm
  modified_base 8: mod_base = um
  modified_base 9: mod_base = OTHER; note = 2'-fluoroguanosine
  modified_base 10: mod_base = OTHER; note = 2'-fluorocytidine
  modified_base 11: mod_base = OTHER; note = 2'-fluoroadenosine
  modified_base 12: mod_base = um
  modified_base 13: mod_base = um
  modified_base 14: mod_base = um
  modified_base 15: mod_base = OTHER; note = 2'-O-methyladenosine
  modified_base 16: mod_base = um
  modified_base 17: mod_base = OTHER; note = 2'-O-methyladenosine
  modified_base 18: mod_base = OTHER; note = 2'-O-methyladenosine
  modified_base 19: mod_base = um
  modified_base 20: mod_base = cm
  modified_base 21: mod_base = OTHER; note = 2'-O-methyladenosine
  source 1..21: mol_type = other RNA
tgactggtgcatttataatca

SEQ ID NO: 1344 - RNA, 21 nt, synthetic construct
  modified_base 1: mod_base = OTHER; note = 2'-O-methyladenosine
  modified_base 2: mod_base = cm
  modified_base 3: mod_base = OTHER; note = 2'-O-methyladenosine
  modified_base 4: mod_base = gm
  modified_base 5: mod_base = cm
  modified_base 6: mod_base = um
  modified_base 7: mod_base = cm
  modified_base 8: mod_base = um
  modified_base 9: mod_base = OTHER; note = 2'-fluoroguanosine
  modified_base 10: mod_base = OTHER; note = 2'-fluoroadenosine
  modified_base 11: mod_base = OTHER; note = 2'-fluorocytidine
  modified_base 12: mod_base = um
  modified_base 13: mod_base = OTHER; note = 2'-O-methyladenosine
  modified_base 14: mod_base = um
  modified_base 15: mod_base = OTHER; note = 2'-O-methyladenosine
  modified_base 16: mod_base = OTHER; note = 2'-O-methyladenosine
  modified_base 17: mod_base = cm
  modified_base 18: mod_base = um
  modified_base 19: mod_base = cm
  modified_base 20: mod_base = um
  modified_base 21: mod_base = OTHER; note = 2'-O-methyladenosine
  source 1..21: mol_type = other RNA
acagctctgactataactcta

SEQ ID NO: 1345 - RNA, 21 nt, synthetic construct
  modified_base 1: mod_base = um
  modified_base 2: mod_base = OTHER; note = 2'-O-methyladenosine
  modified_base 3: mod_base = cm
  modified_base 4: mod_base = cm
  modified_base 5: mod_base = um
  modified_base 6: mod_base = um
  modified_base 7: mod_base = um
  modified_base 8: mod_base = OTHER; note = 2'-O-methyladenosine
  modified_base 9: mod_base = OTHER; note = 2'-fluorocytidine
  modified_base 10: mod_base = OTHER; note = 2'-fluoroadenosine
  modified_base 11: mod_base = OTHER; note = 2'-fluoroguanosine
  modified_base 12: mod_base = OTHER; note = 2'-O-methyladenosine
  modified_base 13: mod_base = gm
  modified_base 14: mod_base = cm
  modified_base 15: mod_base = OTHER; note = 2'-O-methyladenosine
  modified_base 16: mod_base = um
  modified_base 17: mod_base = cm
  modified_base 18: mod_base = cm
  modified_base 19: mod_base = um
  modified_base 20: mod_base = OTHER; note = 2'-O-methyladenosine
  modified_base 21: mod_base = OTHER; note = 2'-O-methyladenosine
  source 1..21: mol_type = other RNA
tacctttacagagcatcctaa

SEQ ID NO: 1346 - RNA, 21 nt, synthetic construct
  modified_base 1: mod_base = gm
  modified_base 2: mod_base = gm
  modified_base 3: mod_base = OTHER; note = 2'-O-methyladenosine
  modified_base 4: mod_base = OTHER; note = 2'-O-methyladenosine
  modified_base 5: mod_base = cm
  modified_base 6: mod_base = um
  modified_base 7: mod_base = OTHER; note = 2'-O-methyladenosine
  modified_base 8: mod_base = OTHER; note = 2'-O-methyladenosine
  modified_base 9: mod_base = OTHER; note = 2'-fluoroguanosine
  modified_base 10: mod_base = OTHER; note = 2'-fluorouridine
  modified_base 11: mod_base = OTHER; note = 2'-fluorouridine
  modified_base 12: mod_base = OTHER; note = 2'-O-methyladenosine
  modified_base 13: mod_base = OTHER; note = 2'-O-methyladenosine
  modified_base 14: mod_base = gm
  modified_base 15: mod_base = um
  modified_base 16: mod_base = cm
  modified_base 17: mod_base = um
  modified_base 18: mod_base = OTHER; note = 2'-O-methyladenosine
  modified_base 19: mod_base = OTHER; note = 2'-O-methyladenosine
  modified_base 20: mod_base = cm
  modified_base 21: mod_base = um
  source 1..21: mol_type = other RNA
ggaactaagttaagtctaact

SEQ ID NO: 1347 - RNA, 21 nt, synthetic construct
  modified_base 1: mod_base = cm
  modified_base 2: mod_base = um
  modified_base 3: mod_base = cm
  modified_base 4: mod_base = OTHER; note = 2'-O-methyladenosine
  modified_base 5: mod_base = gm
  modified_base 6: mod_base = OTHER; note = 2'-O-methyladenosine
  modified_base 7: mod_base = gm
  modified_base 8: mod_base = OTHER; note = 2'-O-methyladenosine
  modified_base 9: mod_base = OTHER; note = 2'-fluoroguanosine
  modified_base 10: mod_base = OTHER; note = 2'-fluoroadenosine
  modified_base 11: mod_base = OTHER; note = 2'-fluorouridine
  modified_base 12: mod_base = um
  modified_base 13: mod_base = gm
  modified_base 14: mod_base = OTHER; note = 2'-O-methyladenosine
  modified_base 15: mod_base = OTHER; note = 2'-O-methyladenosine
  modified_base 16: mod_base = um
  modified_base 17: mod_base = um
  modified_base 18: mod_base = um
  modified_base 19: mod_base = OTHER; note = 2'-O-methyladenosine
  modified_base 20: mod_base = cm
  modified_base 21: mod_base = um
  source 1..21: mol_type = other RNA
ctcagagagattgaatttact

SEQ ID NO: 1348 - RNA, 21 nt, synthetic construct
  modified_base 1: mod_base = cm
  modified_base 2: mod_base = OTHER; note = 2'-O-methyladenosine
  modified_base 3: mod_base = gm
  modified_base 4: mod_base = cm
  modified_base 5: mod_base = um
  modified_base 6: mod_base = cm
  modified_base 7: mod_base = um
  modified_base 8: mod_base = gm
  modified_base 9: mod_base = OTHER; note = 2'-fluoroguanosine
  modified_base 10: mod_base = OTHER; note = 2'-fluorouridine
  modified_base 11: mod_base = OTHER; note = 2'-fluorouridine
  modified_base 12: mod_base = OTHER; note = 2'-O-methyladenosine
  modified_base 13: mod_base = OTHER; note = 2'-O-methyladenosine
  modified_base 14: mod_base = cm
  modified_base 15: mod_base = OTHER; note = 2'-O-methyladenosine
  modified_base 16: mod_base = um
  modified_base 17: mod_base = cm
  modified_base 18: mod_base = OTHER; note = 2'-O-methyladenosine
  modified_base 19: mod_base = OTHER; note = 2'-O-methyladenosine
  modified_base 20: mod_base = cm
  modified_base 21: mod_base = OTHER; note = 2'-O-methyladenosine
  source 1..21: mol_type = other RNA
cagctctggttaacatcaaca

SEQ ID NO: 1349 - RNA, 21 nt, synthetic construct
  modified_base 1: mod_base = gm
  modified_base 2: mod_base = um
  modified_base 3: mod_base = um
  modified_base 4: mod_base = gm
  modified_base 5: mod_base = OTHER; note = 2'-O-methyladenosine
  modified_base 6: mod_base = cm
  modified_base 7: mod_base = cm
  modified_base 8: mod_base = um
  modified_base 9: mod_base = OTHER; note = 2'-fluoroguanosine
  modified_base 10: mod_base = OTHER; note = 2'-fluoroadenosine
  modified_base 11: mod_base = OTHER; note = 2'-fluorocytidine
  modified_base 12: mod_base = OTHER; note = 2'-O-methyladenosine
  modified_base 13: mod_base = um
  modified_base 14: mod_base = cm
  modified_base 15: mod_base = OTHER; note = 2'-O-methyladenosine
  modified_base 16: mod_base = um
  modified_base 17: mod_base = OTHER; note = 2'-O-methyladenosine
  modified_base 18: mod_base = gm
  modified_base 19: mod_base = um
  modified_base 20: mod_base = um
  modified_base 21: mod_base = um
  source 1..21: mol_type = other RNA
gttgacctgacatcatagttt

SEQ ID NO: 1350 - RNA, 21 nt, synthetic construct
  modified_base 1: mod_base = um
  modified_base 2: mod_base = cm
  modified_base 3: mod_base = OTHER; note = 2'-O-methyladenosine
  modified_base 4: mod_base = OTHER; note = 2'-O-methyladenosine
  modified_base 5: mod_base = OTHER; note = 2'-O-methyladenosine
  modified_base 6: mod_base = cm
  modified_base 7: mod_base = OTHER; note = 2'-O-methyladenosine
  modified_base 8: mod_base = gm
  modified_base 9: mod_base = OTHER; note = 2'-fluoroadenosine
  modified_base 10: mod_base = OTHER; note = 2'-fluorouridine
  modified_base 11: mod_base = OTHER; note = 2'-fluorocytidine
  modified_base 12: mod_base = um
  modified_base 13: mod_base = cm
  modified_base 14: mod_base = gm
  modified_base 15: mod_base = um
  modified_base 16: mod_base = um
  modified_base 17: mod_base = OTHER; note = 2'-O-methyladenosine
  modified_base 18: mod_base = OTHER; note = 2'-O-methyladenosine
  modified_base 19: mod_base = um
  modified_base 20: mod_base = gm
  modified_base 21: mod_base = um
  source 1..21: mol_type = other RNA
tcaaacagatctcgttaatgt

SEQ ID NO: 1351 - RNA, 21 nt, synthetic construct
  modified_base 1: mod_base = gm
  modified_base 2: mod_base = um
  modified_base 3: mod_base = um
  modified_base 4: mod_base = cm
  modified_base 5: mod_base = um
  modified_base 6: mod_base = um
  modified_base 7: mod_base = OTHER; note = 2'-O-methyladenosine
  modified_base 8: mod_base = OTHER; note = 2'-O-methyladenosine
  modified_base 9: mod_base = OTHER; note = 2'-fluoroadenosine
  modified_base 10: mod_base = OTHER; note = 2'-fluoroguanosine
  modified_base 11: mod_base = OTHER; note = 2'-fluorocytidine
  modified_base 12: mod_base = um
  modified_base 13: mod_base = OTHER; note = 2'-O-methyladenosine
  modified_base 14: mod_base = um
  modified_base 15: mod_base = OTHER; note = 2'-O-methyladenosine
  modified_base 16: mod_base = um
  modified_base 17: mod_base = um
  modified_base 18: mod_base = cm
  modified_base 19: mod_base = um
  modified_base 20: mod_base = gm
  modified_base 21: mod_base = OTHER; note = 2'-O-methyladenosine
  source 1..21: mol_type = other RNA
gttcttaaagctatattctga

SEQ ID NO: 1352 - RNA, 21 nt, synthetic construct
  modified_base 1: mod_base = cm
  modified_base 2: mod_base = um
  modified_base 3: mod_base = OTHER; note = 2'-O-methyladenosine
  modified_base 4: mod_base = cm
  modified_base 5: mod_base = OTHER; note = 2'-O-methyladenosine
  modified_base 6: mod_base = cm
  modified_base 7: mod_base = OTHER; note = 2'-O-methyladenosine
  modified_base 8: mod_base = OTHER; note = 2'-O-methyladenosine
  modified_base 9: mod_base = OTHER; note = 2'-fluoroadenosine
  modified_base 10: mod_base = OTHER; note = 2'-fluoroguanosine
  modified_base 11: mod_base = OTHER; note = 2'-fluoroguanosine
  modified_base 12: mod_base = OTHER; note = 2'-O-methyladenosine
  modified_base 13: mod_base = cm
  modified_base 14: mod_base = cm
  modified_base 15: mod_base = um
  modified_base 16: mod_base = OTHER; note = 2'-O-methyladenosine
  modified_base 17: mod_base = cm
  modified_base 18: mod_base = um
  modified_base 19: mod_base = OTHER; note = 2'-O-methyladenosine
  modified_base 20: mod_base = cm
  modified_base 21: mod_base = um
  source 1..21: mol_type = other RNA
ctacacaaaggacctactact

SEQ ID NO: 1353 - RNA, 21 nt, synthetic construct
  modified_base 1: mod_base = gm
  modified_base 2: mod_base = OTHER; note = 2'-O-methyladenosine
  modified_base 3: mod_base = cm
  modified_base 4: mod_base = gm
  modified_base 5: mod_base = um
  modified_base 6: mod_base = cm
  modified_base 7: mod_base = cm
  modified_base 8: mod_base = um
  modified_base 9: mod_base = OTHER; note = 2'-fluorocytidine
  modified_base 10: mod_base = OTHER; note = 2'-fluoroadenosine
  modified_base 11: mod_base = OTHER; note = 2'-fluorouridine
  modified_base 12: mod_base = cm
  modified_base 13: mod_base = OTHER; note = 2'-O-methyladenosine
  modified_base 14: mod_base = OTHER; note = 2'-O-methyladenosine
  modified_base 15: mod_base = OTHER; note = 2'-O-methyladenosine
  modified_base 16: mod_base = um
  modified_base 17: mod_base = OTHER; note = 2'-O-methyladenosine
  modified_base 18: mod_base = gm
  modified_base 19: mod_base = cm
  modified_base 20: mod_base = OTHER; note = 2'-O-methyladenosine
  modified_base 21: mod_base = OTHER; note = 2'-O-methyladenosine
  source 1..21: mol_type = other RNA
gacgtcctcatcaaatagcaa

SEQ ID NO: 1354 - RNA, 21 nt, synthetic construct
  modified_base 1: mod_base = um
  modified_base 2: mod_base = cm
  modified_base 3: mod_base = OTHER; note = 2'-O-methyladenosine
  modified_base 4: mod_base = gm
  modified_base 5: mod_base = OTHER; note = 2'-O-methyladenosine
  modified_base 6: mod_base = OTHER; note = 2'-O-methyladenosine
  modified_base 7: mod_base = cm
  modified_base 8: mod_base = um
  modified_base 9: mod_base = OTHER; note = 2'-fluoroguanosine
  modified_base 10: mod_base = OTHER; note = 2'-fluoroadenosine
  modified_base 11: mod_base = OTHER; note = 2'-fluoroguanosine
  modified_base 12: mod_base = OTHER; note = 2'-O-methyladenosine
  modified_base 13: mod_base = cm
  modified_base 14: mod_base = cm
  modified_base 15: mod_base = um
  modified_base 16: mod_base = cm
  modified_base 17: mod_base = um
  modified_base 18: mod_base = OTHER; note = 2'-O-methyladenosine
  modified_base 19: mod_base = cm
  modified_base 20: mod_base = OTHER; note = 2'-O-methyladenosine
  modified_base 21: mod_base = um
  source 1..21: mol_type = other RNA
tcagaactgagacctctacat

SEQ ID NO: 1355 - RNA, 21 nt, synthetic construct
  modified_base 1: mod_base = um
  modified_base 2: mod_base = gm
  modified_base 3: mod_base = OTHER; note = 2'-O-methyladenosine
  modified_base 4: mod_base = gm
  modified_base 5: mod_base = OTHER; note = 2'-O-methyladenosine
  modified_base 6: mod_base = cm
  modified_base 7: mod_base = cm
  modified_base 8: mod_base = um
  modified_base 9: mod_base = OTHER; note = 2'-fluorocytidine
  modified_base 10: mod_base = OTHER; note = 2'-fluorouridine
  modified_base 11: mod_base = OTHER; note = 2'-fluoroadenosine
  modified_base 12: mod_base = cm
  modified_base 13: mod_base = OTHER; note = 2'-O-methyladenosine
  modified_base 14: mod_base = um
  modified_base 15: mod_base = um
  modified_base 16: mod_base = um
  modified_base 17: mod_base = um
  modified_base 18: mod_base = cm
  modified_base 19: mod_base = um
  modified_base 20: mod_base = um
  modified_base 21: mod_base = um
  source 1..21: mol_type = other RNA
tgagacctctacattttcttt

SEQ ID NO: 1356 - RNA, 21 nt, synthetic construct
  modified_base 1: mod_base = um
  modified_base 2: mod_base = gm
  modified_base 3: mod_base = um
  modified_base 4: mod_base = gm
  modified_base 5: mod_base = OTHER; note = 2'-O-methyladenosine
  modified_base 6: mod_base = um
  modified_base 7: mod_base = um
  modified_base 8: mod_base = um
  modified_base 9: mod_base = OTHER; note = 2'-fluorouridine
  modified_base 10: mod_base = OTHER; note = 2'-fluorocytidine
  modified_base 11: mod_base = OTHER; note = 2'-fluoroadenosine
  modified_base 12: mod_base = cm
  modified_base 13: mod_base = OTHER; note = 2'-O-methyladenosine
  modified_base 14: mod_base = um
  modified_base 15: mod_base = um
  modified_base 16: mod_base = um
  modified_base 17: mod_base = um
  modified_base 18: mod_base = um
  modified_base 19: mod_base = cm
  modified_base 20: mod_base = gm
  modified_base 21: mod_base = um
  source 1..21: mol_type = other RNA
tgtgattttcacatttttcgt

SEQ ID NO: 1357 - RNA, 21 nt, synthetic construct
  modified_base 1: mod_base = OTHER; note = 2'-O-methyladenosine
  modified_base 2: mod_base = OTHER; note = 2'-O-methyladenosine
  modified_base 3: mod_base = cm
  modified_base 4: mod_base = um
  modified_base 5: mod_base = um
  modified_base 6: mod_base = OTHER; note = 2'-O-methyladenosine
  modified_base 7: mod_base = gm
  modified_base 8: mod_base = um
  modified_base 9: mod_base = OTHER; note = 2'-fluoroadenosine
  modified_base 10: mod_base = OTHER; note = 2'-fluoroguanosine
  modified_base 11: mod_base = OTHER; note = 2'-fluoroguanosine
  modified_base 12: mod_base = OTHER; note = 2'-O-methyladenosine
  modified_base 13: mod_base = cm
  modified_base 14: mod_base = um
  modified_base 15: mod_base = um
  modified_base 16: mod_base = cm
  modified_base 17: mod_base = OTHER; note = 2'-O-methyladenosine
  modified_base 18: mod_base = gm
  modified_base 19: mod_base = um
  modified_base 20: mod_base = OTHER; note = 2'-O-methyladenosine
  modified_base 21: mod_base = OTHER; note = 2'-O-methyladenosine
  source 1..21: mol_type = other RNA
aacttagtaggacttcagtaa

SEQ ID NO: 1358 - RNA, 21 nt, synthetic construct
  modified_base 1: mod_base = cm
  modified_base 2: mod_base = um
  modified_base 3: mod_base = cm
  modified_base 4: mod_base = cm
  modified_base 5: mod_base = um
  modified_base 6: mod_base = gm
  modified_base 7: mod_base = cm
  modified_base 8: mod_base = um
  modified_base 9: mod_base = OTHER; note = 2'-fluorouridine
  modified_base 10: mod_base = OTHER; note = 2'-fluorocytidine
  modified_base 11: mod_base = OTHER; note = 2'-fluorouridine
  modified_base 12: mod_base = cm
  modified_base 13: mod_base = cm
  modified_base 14: mod_base = gm
  modified_base 15: mod_base = um
  modified_base 16: mod_base = um
  modified_base 17: mod_base = um
  modified_base 18: mod_base = OTHER; note = 2'-O-methyladenosine
  modified_base 19: mod_base = um
  modified_base 20: mod_base = cm
  modified_base 21: mod_base = um
  source 1..21: mol_type = other RNA
ctcctgcttctccgtttatct

SEQ ID NO: 1359 - RNA, 21 nt, synthetic construct
  modified_base 1: mod_base = um
  modified_base 2: mod_base = gm
  modified_base 3: mod_base = gm
  modified_base 4: mod_base = OTHER; note = 2'-O-methyladenosine
  modified_base 5: mod_base = OTHER; note = 2'-O-methyladenosine
  modified_base 6: mod_base = gm
  modified_base 7: mod_base = OTHER; note = 2'-O-methyladenosine
  modified_base 8: mod_base = OTHER; note = 2'-O-methyladenosine
  modified_base 9: mod_base = OTHER; note = 2'-fluorouridine
  modified_base 10: mod_base = OTHER; note = 2'-fluoroadenosine
  modified_base 11: mod_base = OTHER; note = 2'-fluorouridine
  modified_base 12: mod_base = cm
  modified_base 13: mod_base = cm
  modified_base 14: mod_base = um
  modified_base 15: mod_base = OTHER; note = 2'-O-methyladenosine
  modified_base 16: mod_base = gm
  modified_base 17: mod_base = OTHER; note = 2'-O-methyladenosine
  modified_base 18: mod_base = OTHER; note = 2'-O-methyladenosine
  modified_base 19: mod_base = um
  modified_base 20: mod_base = gm
  modified_base 21: mod_base = um
  source 1..21: mol_type = other RNA
tggaagaatatcctagaatgt

SEQ ID NO: 1360 - RNA, 21 nt, synthetic construct
  modified_base 1: mod_base = OTHER; note = 2'-O-methyladenosine
  modified_base 2: mod_base = OTHER; note = 2'-O-methyladenosine
  modified_base 3: mod_base = gm
  modified_base 4: mod_base = gm
  modified_base 5: mod_base = OTHER; note = 2'-O-methyladenosine
  modified_base 6: mod_base = OTHER; note = 2'-O-methyladenosine
  modified_base 7: mod_base = OTHER; note = 2'-O-methyladenosine
  modified_base 8: mod_base = gm
  modified_base 9: mod_base = OTHER; note = 2'-fluorocytidine
  modified_base 10: mod_base = OTHER; note = 2'-fluoroadenosine
  modified_base 11: mod_base = OTHER; note = 2'-fluorouridine
  modified_base 12: mod_base = OTHER; note = 2'-O-methyladenosine
  modified_base 13: mod_base = um
  modified_base 14: mod_base = gm
  modified_base 15: mod_base = um
  modified_base 16: mod_base = cm
  modified_base 17: mod_base = OTHER; note = 2'-O-methyladenosine
  modified_base 18: mod_base = gm
  modified_base 19: mod_base = um
  modified_base 20: mod_base = um
  modified_base 21: mod_base = OTHER; note = 2'-O-methyladenosine
  source 1..21: mol_type = other RNA
aaggaaagcatatgtcagtta

SEQ ID NO: 1361 - RNA, 21 nt, synthetic construct
  modified_base 1: mod_base = cm
  modified_base 2: mod_base = um
  modified_base 3: mod_base = OTHER; note = 2'-O-methyladenosine
  modified_base 4: mod_base = cm
  modified_base 5: mod_base = um
  modified_base 6: mod_base = gm
  modified_base 7: mod_base = OTHER; note = 2'-O-methyladenosine
  modified_base 8: mod_base = OTHER; note = 2'-O-methyladenosine
  modified_base 9: mod_base = OTHER; note = 2'-fluoroadenosine
  modified_base 10: mod_base = OTHER; note = 2'-fluoroadenosine
  modified_base 11: mod_base = OTHER; note = 2'-fluorocytidine
  modified_base 12: mod_base = cm
  modified_base 13: mod_base = um
  modified_base 14: mod_base = um
  modified_base 15: mod_base = um
  modified_base 16: mod_base = OTHER; note = 2'-O-methyladenosine
  modified_base 17: mod_base = OTHER; note = 2'-O-methyladenosine
  modified_base 18: mod_base = OTHER; note = 2'-O-methyladenosine
  modified_base 19: mod_base = OTHER; note = 2'-O-methylinosine
  modified_base 20: mod_base = gm
  modified_base 21: mod_base = OTHER; note = 2'-O-methyladenosine
  source 1..21: mol_type = other RNA
ctactgaaaacctttaaanga

SEQ ID NO: 1362 - RNA, 21 nt, synthetic construct
  modified_base 1: mod_base = cm
  modified_base 2: mod_base = um
  modified_base 3: mod_base = OTHER; note = 2'-O-methyladenosine
  modified_base 4: mod_base = cm
  modified_base 5: mod_base = um
  modified_base 6: mod_base = gm
  modified_base 7: mod_base = OTHER; note = 2'-O-methyladenosine
  modified_base 8: mod_base = OTHER; note = 2'-O-methyladenosine
  modified_base 9: mod_base = OTHER; note = 2'-fluoroadenosine
  modified_base 10: mod_base = OTHER; note = 2'-O-methyladenosine
  modified_base 11: mod_base = OTHER; note = 2'-fluorocytidine
  modified_base 12: mod_base = cm
  modified_base 13: mod_base = OTHER; note = 2'-fluorouridine
  modified_base 14: mod_base = um
  modified_base 15: mod_base = um
  modified_base 16: mod_base = OTHER; note = 2'-O-methyladenosine
  modified_base 17: mod_base = OTHER; note = 2'-O-methyladenosine
  modified_base 18: mod_base = OTHER; note = 2'-O-methyladenosine
  modified_base 19: mod_base = gm
  modified_base 20: mod_base = gm
  modified_base 21: mod_base = OTHER; note = 2'-O-methyladenosine
  source 1..21: mol_type = other RNA
ctactgaaaacctttaaagga

SEQ ID NO: 1363 - RNA, 21 nt, synthetic construct
  modified_base 1: mod_base = gm
  modified_base 2: mod_base = um
  modified_base 3: mod_base = gm
  modified_base 4: mod_base = gm
  modified_base 5: mod_base = gm
  modified_base 6: mod_base = OTHER; note = 2'-O-methyladenosine
  modified_base 7: mod_base = gm
  modified_base 8: mod_base = OTHER; note = 2'-O-methyladenosine
  modified_base 9: mod_base = OTHER; note = 2'-fluorocytidine
  modified_base 10: mod_base = cm
  modified_base 11: mod_base = OTHER; note = 2'-fluorocytidine
  modified_base 12: mod_base = um
  modified_base 13: mod_base = OTHER; note = 2'-fluoroguanosine
  modified_base 14: mod_base = um
  modified_base 15: mod_base = gm
  modified_base 16: mod_base = um
  modified_base 17: mod_base = OTHER; note = 2'-O-methyladenosine
  modified_base 18: mod_base = cm
  modified_base 19: mod_base = cm
  modified_base 20: mod_base = um
  modified_base 21: mod_base = OTHER; note = 2'-O-methyladenosine
  source 1..21: mol_type = other RNA
gtgggagaccctgtgtaccta

SEQ ID NO: 1364 - RNA, 21 nt, synthetic construct
  modified_base 1: mod_base = gm
  modified_base 2: mod_base = um
  modified_base 3: mod_base = gm
  modified_base 4: mod_base = gm
  modified_base 5: mod_base = gm
  modified_base 6: mod_base = OTHER; note = 2'-O-methyladenosine
  modified_base 7: mod_base = gm
  modified_base 8: mod_base = OTHER; note = 2'-O-methyladenosine
  modified_base 9: mod_base = OTHER; note = 2'-fluorocytidine
  modified_base 10: mod_base = OTHER; note = 2'-fluorocytidine
  modified_base 11: mod_base = OTHER; note = 2'-fluorocytidine
  modified_base 12: mod_base = um
  modified_base 13: mod_base = gm
  modified_base 14: mod_base = um
  modified_base 15: mod_base = gm
  modified_base 16: mod_base = um
  modified_base 17: mod_base = OTHER; note = 2'-O-methyladenosine
  modified_base 18: mod_base = um
  modified_base 19: mod_base = cm
  modified_base 20: mod_base = um
  modified_base 21: mod_base = OTHER; note = 2'-O-methyladenosine
  source 1..21: mol_type = other RNA
gtgggagaccctgtgtatcta

SEQ ID NO: 1365 - RNA, 21 nt, synthetic construct
  modified_base 1: mod_base = OTHER; note = 2'-O-methyladenosine
  modified_base 2: mod_base = OTHER; note = 2'-O-methyladenosine
  modified_base 3: mod_base = um
  modified_base 4: mod_base = gm
  modified_base 5: mod_base = OTHER; note = 2'-O-methyladenosine
  modified_base 6: mod_base = cm
  modified_base 7: mod_base = OTHER; note = 2'-O-methyladenosine
  modified_base 8: mod_base = OTHER; note = 2'-O-methyladenosine
  modified_base 9: mod_base = OTHER; note = 2'-fluoroguanosine
  modified_base 10: mod_base = OTHER; note = 2'-fluoroadenosine
  modified_base 11: mod_base = OTHER; note = 2'-fluorocytidine
  modified_base 12: mod_base = OTHER; note = 2'-O-methyladenosine
  modified_base 13: mod_base = gm
  modified_base 14: mod_base = gm
  modified_base 15: mod_base = OTHER; note = 2'-O-methyladenosine
  modified_base 16: mod_base = um
  modified_base 17: mod_base = um
  modified_base 18: mod_base = cm
  modified_base 19: mod_base = um
  modified_base 20: mod_base = gm
  modified_base 21: mod_base = um
  source 1..21: mol_type = other RNA
aatgacaagacaggattctgt

SEQ ID NO: 1366 - RNA, 21 nt, synthetic construct
  modified_base 1: mod_base = OTHER; note = 2'-O-methyladenosine
  modified_base 2: mod_base = OTHER; note = 2'-O-methyladenosine
  modified_base 3: mod_base = um
  modified_base 4: mod_base = gm
  modified_base 5: mod_base = OTHER; note = 2'-O-methyladenosine
  modified_base 6: mod_base = cm
  modified_base 7: mod_base = OTHER; note = 2'-O-methyladenosine
  modified_base 8: mod_base = OTHER; note = 2'-O-methyladenosine
  modified_base 9: mod_base = OTHER; note = 2'-fluoroguanosine
  modified_base 10: mod_base = OTHER; note = 2'-O-methyladenosine
  modified_base 11: mod_base = OTHER; note = 2'-fluorocytidine
  modified_base 12: mod_base = OTHER; note = 2'-O-methyladenosine
  modified_base 13: mod_base = OTHER; note = 2'-fluoroguanosine
  modified_base 14: mod_base = gm
  modified_base 15: mod_base = OTHER; note = 2'-O-methyladenosine
  modified_base 16: mod_base = um
  modified_base 17: mod_base = um
  modified_base 18: mod_base = cm
  modified_base 19: mod_base = um
  modified_base 20: mod_base = gm
  modified_base 21: mod_base = OTHER; note = 2'-O-methyladenosine
  source 1..21: mol_type = other RNA
aatgacaagacaggattctga

SEQ ID NO: 1367 - RNA, 21 nt, synthetic construct
  modified_base 1: mod_base = OTHER; note = 2'-O-methyladenosine
  modified_base 2: mod_base = OTHER; note = 2'-O-methyladenosine
  modified_base 3: mod_base = cm
  modified_base 4: mod_base = gm
  modified_base 5: mod_base = OTHER; note = 2'-O-methyladenosine
  modified_base 6: mod_base = cm
  modified_base 7: mod_base = OTHER; note = 2'-O-methyladenosine
  modified_base 8: mod_base = OTHER; note = 2'-O-methyladenosine
  modified_base 9: mod_base = OTHER; note = 2'-fluoroguanosine
  modified_base 10: mod_base = OTHER; note = 2'-fluoroadenosine
  modified_base 11: mod_base = OTHER; note = 2'-fluorocytidine
  modified_base 12: mod_base = OTHER; note = 2'-O-methyladenosine
  modified_base 13: mod_base = gm
  modified_base 14: mod_base = gm
  modified_base 15: mod_base = OTHER; note = 2'-O-methyladenosine
  modified_base 16: mod_base = um
  modified_base 17: mod_base = um
  modified_base 18: mod_base = cm
  modified_base 19: mod_base = um
  modified_base 20: mod_base = gm
  modified_base 21: mod_base = OTHER; note = 2'-O-methyladenosine
  source 1..21: mol_type = other RNA
aacgacaagacaggattctga

SEQ ID NO: 1368 - RNA, 21 nt, synthetic construct
  modified_base 1: mod_base = gm
  modified_base 2: mod_base = OTHER; note = 2'-O-methyladenosine
  modified_base 3: mod_base = um
  modified_base 4: mod_base = gm
  modified_base 5: mod_base = OTHER; note = 2'-O-methyladenosine
  modified_base 6: mod_base = cm
  modified_base 7: mod_base = OTHER; note = 2'-O-methyladenosine
  modified_base 8: mod_base = OTHER; note = 2'-O-methyladenosine
  modified_base 9: mod_base = OTHER; note = 2'-fluoroguanosine
  modified_base 10: mod_base = OTHER; note = 2'-fluoroadenosine
  modified_base 11: mod_base = OTHER; note = 2'-fluorocytidine
  modified_base 12: mod_base = OTHER; note = 2'-O-methyladenosine
  modified_base 13: mod_base = gm
  modified_base 14: mod_base = gm
  modified_base 15: mod_base = OTHER; note = 2'-O-methyladenosine
  modified_base 16: mod_base = um
  modified_base 17: mod_base = um
  modified_base 18: mod_base = cm
  modified_base 19: mod_base = um
  modified_base 20: mod_base = gm
  modified_base 21: mod_base = OTHER; note = 2'-O-methyladenosine
  source 1..21: mol_type = other RNA
gatgacaagacaggattctga

SEQ ID NO: 1369 - RNA, 21 nt, synthetic construct
  modified_base 1: mod_base = gm
  modified_base 2: mod_base = OTHER; note = 2'-O-methyladenosine
  modified_base 3: mod_base = um
  modified_base 4: mod_base = gm
  modified_base 5: mod_base = OTHER; note = 2'-O-methyladenosine
  modified_base 6: mod_base = cm
  modified_base 7: mod_base = OTHER; note = 2'-O-methyladenosine
  modified_base 8: mod_base = OTHER; note = 2'-O-methyladenosine
  modified_base 9: mod_base = OTHER; note = 2'-fluoroguanosine
  modified_base 10: mod_base = OTHER; note = 2'-O-methyladenosine
  modified_base 11: mod_base = OTHER; note = 2'-fluorocytidine
  modified_base 12: mod_base = OTHER; note = 2'-O-methyladenosine
  modified_base 13: mod_base = OTHER; note = 2'-fluoroguanosine
  modified_base 14: mod_base = gm
  modified_base 15: mod_base = OTHER; note = 2'-O-methyladenosine
  modified_base 16: mod_base = um
  modified_base 17: mod_base = um
  modified_base 18: mod_base = cm
  modified_base 19: mod_base = um
  modified_base 20: mod_base = gm
  modified_base 21: mod_base = um
  source 1..21: mol_type = other RNA
gatgacaagacaggattctgt

SEQ ID NO: 1370 - RNA, 21 nt, synthetic construct
  modified_base 1: mod_base = gm
  modified_base 2: mod_base = OTHER; note = 2'-O-methyladenosine
  modified_base 3: mod_base = um
  modified_base 4: mod_base = gm
  modified_base 5: mod_base = OTHER; note = 2'-O-methyladenosine
  modified_base 6: mod_base = cm
  modified_base 7: mod_base = OTHER; note = 2'-O-methyladenosine
  modified_base 8: mod_base = OTHER; note = 2'-O-methyladenosine
  modified_base 9: mod_base = OTHER; note = 2'-fluoroguanosine
  modified_base 10: mod_base = OTHER; note = 2'-fluoroadenosine
  modified_base 11: mod_base = OTHER; note = 2'-fluorocytidine
  modified_base 12: mod_base = OTHER; note = 2'-O-methyladenosine
  modified_base 13: mod_base = gm
  modified_base 14: mod_base = gm
  modified_base 15: mod_base = OTHER; note = 2'-O-methyladenosine
  modified_base 16: mod_base = um
  modified_base 17: mod_base = um
  modified_base 18: mod_base = cm
  modified_base 19: mod_base = um
  modified_base 20: mod_base = gm
  modified_base 21: mod_base = um
  source 1..21: mol_type = other RNA
gatgacaagacaggattctgt

SEQ ID NO: 1371 - RNA, 21 nt, synthetic construct
  modified_base 1: mod_base = gm
  modified_base 2: mod_base = um
  modified_base 3: mod_base = cm
  modified_base 4: mod_base = cm
  modified_base 5: mod_base = um
  modified_base 6: mod_base = gm
  modified_base 7: mod_base = gm
  modified_base 8: mod_base = OTHER; note = 2'-O-methyladenosine
  modified_base 9: mod_base = OTHER; note = 2'-fluoroadenosine
  modified_base 10: mod_base = OTHER; note = 2'-fluorouridine
  modified_base 11: mod_base = OTHER; note = 2'-fluoroadenosine
  modified_base 12: mod_base = um
  modified_base 13: mod_base = um
  modified_base 14: mod_base = OTHER; note = 2'-O-methyladenosine
  modified_base 15: mod_base = gm
  modified_base 16: mod_base = OTHER; note = 2'-O-methyladenosine
  modified_base 17: mod_base = um
  modified_base 18: mod_base = gm
  modified_base 19: mod_base = cm
  modified_base 20: mod_base = cm
  modified_base 21: mod_base = um
  source 1..21: mol_type = other RNA
gtcctggaatattagatgcct

SEQ ID NO: 1372 - RNA, 21 nt, synthetic construct
  modified_base 1: mod_base = um
  modified_base 2: mod_base = gm
  modified_base 3: mod_base = um
  modified_base 4: mod_base = cm
  modified_base 5: mod_base = cm
  modified_base 6: mod_base = um
  modified_base 7: mod_base = gm
  modified_base 8: mod_base = gm
  modified_base 9: mod_base = OTHER; note = 2'-fluoroadenosine
  modified_base 10: mod_base = OTHER; note = 2'-fluoroadenosine
  modified_base 11: mod_base = OTHER; note = 2'-fluorouridine
  modified_base 12: mod_base = OTHER; note = 2'-O-methyladenosine
  modified_base 13: mod_base = um
  modified_base 14: mod_base = um
  modified_base 15: mod_base = OTHER; note = 2'-O-methyladenosine
  modified_base 16: mod_base = gm
  modified_base 17: mod_base = OTHER; note = 2'-O-methyladenosine
  modified_base 18: mod_base = um
  modified_base 19: mod_base = gm
  modified_base 20: mod_base = cm
  modified_base 21: mod_base = um
  source 1..21: mol_type = other RNA
tgtcctggaatattagatgct

SEQ ID NO: 1373 - RNA, 21 nt, synthetic construct
  modified_base 1: mod_base = um
  modified_base 2: mod_base = cm
  modified_base 3: mod_base = cm
  modified_base 4: mod_base = um
  modified_base 5: mod_base = gm
  modified_base 6: mod_base = gm
  modified_base 7: mod_base = OTHER; note = 2'-O-methyladenosine
  modified_base 8: mod_base = OTHER; note = 2'-O-methyladenosine
  modified_base 9: mod_base = OTHER; note = 2'-fluorouridine
  modified_base 10: mod_base = OTHER; note = 2'-fluoroadenosine
  modified_base 11: mod_base = OTHER; note = 2'-fluorouridine
  modified_base 12: mod_base = um
  modified_base 13: mod_base = OTHER; note = 2'-O-methyladenosine
  modified_base 14: mod_base = gm
  modified_base 15: mod_base = OTHER; note = 2'-O-methyladenosine
  modified_base 16: mod_base = um
  modified_base 17: mod_base = gm
  modified_base 18: mod_base = cm
  modified_base 19: mod_base = cm
  modified_base 20: mod_base = um
  modified_base 21: mod_base = um
  source 1..21: mol_type = other RNA
tcctggaatattagatgcctt

SEQ ID NO: 1374 - RNA, 21 nt, synthetic construct
  modified_base 1: mod_base = gm
  modified_base 2: mod_base = um
  modified_base 3: mod_base = um
  modified_base 4: mod_base = cm
  modified_base 5: mod_base = um
  modified_base 6: mod_base = cm
  modified_base 7: mod_base = OTHER; note = 2'-O-methyladenosine
  modified_base 8: mod_base = OTHER; note = 2'-O-methyladenosine
  modified_base 9: mod_base = OTHER; note = 2'-fluoroadenosine
  modified_base 10: mod_base = OTHER; note = 2'-O-methyladenosine
  modified_base 11: mod_base = OTHER; note = 2'-fluoroadenosine
  modified_base 12: mod_base = um
  modified_base 13: mod_base = OTHER; note = 2'-fluoroguanosine
  modified_base 14: mod_base = OTHER; note = 2'-O-methyladenosine
  modified_base 15: mod_base = cm
  modified_base 16: mod_base = OTHER; note = 2'-O-methyladenosine
  modified_base 17: mod_base = OTHER; note = 2'-O-methyladenosine
  modified_base 18: mod_base = cm
  modified_base 19: mod_base = OTHER; note = 2'-O-methyladenosine
  modified_base 20: mod_base = cm
  modified_base 21: mod_base = OTHER; note = 2'-O-methyladenosine
  source 1..21: mol_type = other RNA
gttctcaaaaatgacaacaca

SEQ ID NO: 1375 - RNA, 21 nt, synthetic construct
  modified_base 1: mod_base = um
  modified_base 2: mod_base = gm
  modified_base 3: mod_base = cm
  modified_base 4: mod_base = cm
  modified_base 5: mod_base = OTHER; note = 2'-O-methyladenosine
  modified_base 6: mod_base = um
  modified_base 7: mod_base = um
  modified_base 8: mod_base = um
  modified_base 9: mod_base = OTHER; note = 2'-fluorouridine
  modified_base 10: mod_base = gm
  modified_base 11: mod_base = OTHER; note = 2'-fluorouridine
  modified_base 12: mod_base = cm
  modified_base 13: mod_base = OTHER; note = 2'-fluorocytidine
  modified_base 14: mod_base = um
  modified_base 15: mod_base = um
  modified_base 16: mod_base = um
  modified_base 17: mod_base = gm
  modified_base 18: mod_base = OTHER; note = 2'-O-methyladenosine
  modified_base 19: mod_base = um
  modified_base 20: mod_base = um
  modified_base 21: mod_base = OTHER; note = 2'-O-methyladenosine
  source 1..21: mol_type = other RNA
tgccattttgtcctttgatta

SEQ ID NO: 1376 - RNA, 21 nt, synthetic construct
  modified_base 1: mod_base = OTHER; note = 2'-O-methyladenosine
  modified_base 2: mod_base = OTHER; note = 2'-O-methyladenosine
  modified_base 3: mod_base = cm
  modified_base 4: mod_base = gm
  modified_base 5: mod_base = OTHER; note = 2'-O-methyladenosine
  modified_base 6: mod_base = cm
  modified_base 7: mod_base = OTHER; note = 2'-O-methyladenosine
  modified_base 8: mod_base = OTHER; note = 2'-O-methyladenosine
  modified_base 9: mod_base = OTHER; note = 2'-fluoroguanosine
  modified_base 10: mod_base = OTHER; note = 2'-fluoroadenosine
  modified_base 11: mod_base = OTHER; note = 2'-fluorocytidine
  modified_base 12: mod_base = OTHER; note = 2'-O-methyladenosine
  modified_base 13: mod_base = gm
  modified_base 14: mod_base = gm
  modified_base 15: mod_base = OTHER; note = 2'-O-methyladenosine
  modified_base 16: mod_base = um
  modified_base 17: mod_base = um
  modified_base 18: mod_base = cm
  modified_base 19: mod_base = um
  modified_base 20: mod_base = gm
  modified_base 21: mod_base = um
  source 1..21: mol_type = other RNA
aacgacaagacaggattctgt

SEQ ID NO: 1377 - RNA, 21 nt, synthetic construct
  modified_base 1: mod_base = cm
  modified_base 2: mod_base = gm
  modified_base 3: mod_base = gm
  modified_base 4: mod_base = um
  modified_base 5: mod_base = gm
  modified_base 6: mod_base = um
  modified_base 7: mod_base = cm
  modified_base 8: mod_base = um
  modified_base 9: mod_base = OTHER; note = 2'-fluorocytidine
  modified_base 10: mod_base = OTHER; note = 2'-fluoroadenosine
  modified_base 11: mod_base = OTHER; note = 2'-fluoroadenosine
  modified_base 12: mod_base = um
  modified_base 13: mod_base = gm
  modified_base 14: mod_base = cm
  modified_base 15: mod_base = um
  modified_base 16: mod_base = um
  modified_base 17: mod_base = cm
  modified_base 18: mod_base = OTHER; note = 2'-O-methyladenosine
  modified_base 19: mod_base = OTHER; note = 2'-O-methyladenosine
  modified_base 20: mod_base = um
  modified_base 21: mod_base = OTHER; note = 2'-O-methyladenosine
  source 1..21: mol_type = other RNA
cggtgtctcaatgcttcaata

SEQ ID NO: 1378 - RNA, 21 nt, synthetic construct
  modified_base 1: mod_base = cm
  modified_base 2: mod_base = gm
  modified_base 3: mod_base = OTHER; note = 2'-O-methyladenosine
  modified_base 4: mod_base = um
  modified_base 5: mod_base = gm
  modified_base 6: mod_base = um
  modified_base 7: mod_base = cm
  modified_base 8: mod_base = um
  modified_base 9: mod_base = OTHER; note = 2'-fluorocytidine
  modified_base 10: mod_base = OTHER; note = 2'-fluoroadenosine
  modified_base 11: mod_base = OTHER; note = 2'-fluoroadenosine
  modified_base 12: mod_base = um
  modified_base 13: mod_base = gm
  modified_base 14: mod_base = cm
  modified_base 15: mod_base = um
  modified_base 16: mod_base = um
  modified_base 17: mod_base = cm
  modified_base 18: mod_base = OTHER; note = 2'-O-methyladenosine
  modified_base 19: mod_base = OTHER; note = 2'-O-methyladenosine
  modified_base 20: mod_base = um
  modified_base 21: mod_base = OTHER; note = 2'-O-methyladenosine
  source 1..21: mol_type = other RNA
cgatgtctcaatgcttcaata

SEQ ID NO: 1379 - RNA, 21 nt, synthetic construct
  modified_base 1: mod_base = gm
  modified_base 2: mod_base = OTHER; note = 2'-O-methyladenosine
  modified_base 3: mod_base = cm
  modified_base 4: mod_base = gm
  modified_base 5: mod_base = OTHER; note = 2'-O-methyladenosine
  modified_base 6: mod_base = cm
  modified_base 7: mod_base = OTHER; note = 2'-O-methyladenosine
  modified_base 8: mod_base = OTHER; note = 2'-O-methyladenosine
  modified_base 9: mod_base = OTHER; note = 2'-fluoroguanosine
  modified_base 10: mod_base = OTHER; note = 2'-fluoroadenosine
  modified_base 11: mod_base = OTHER; note = 2'-fluorocytidine
  modified_base 12: mod_base = OTHER; note = 2'-O-methyladenosine
  modified_base 13: mod_base = gm
  modified_base 14: mod_base = gm
  modified_base 15: mod_base = OTHER; note = 2'-O-methyladenosine
  modified_base 16: mod_base = um
  modified_base 17: mod_base = um
  modified_base 18: mod_base = cm
  modified_base 19: mod_base = um
  modified_base 20: mod_base = gm
  modified_base 21: mod_base = OTHER; note = 2'-O-methyladenosine
  source 1..21: mol_type = other RNA
gacgacaagacaggattctga

SEQ ID NO: 1380 - RNA, 21 nt, synthetic construct
  modified_base 1: mod_base = OTHER; note = 2'-O-methyladenosine
  modified_base 2: mod_base = gm
  modified_base 3: mod_base = gm
  modified_base 4: mod_base = cm
  modified_base 5: mod_base = um
  modified_base 6: mod_base = OTHER; note = 2'-O-methyladenosine
  modified_base 7: mod_base = gm
  modified_base 8: mod_base = OTHER; note = 2'-O-methyladenosine
  modified_base 9: mod_base = OTHER; note = 2'-fluoroguanosine
  modified_base 10: mod_base = OTHER; note = 2'-fluoroadenosine
  modified_base 11: mod_base = OTHER; note = 2'-fluoroadenosine
  modified_base 12: mod_base = gm
  modified_base 13: mod_base = OTHER; note = 2'-O-methyladenosine
  modified_base 14: mod_base = OTHER; note = 2'-O-methyladenosine
  modified_base 15: mod_base = OTHER; note = 2'-O-methyladenosine
  modified_base 16: mod_base = gm
  modified_base 17: mod_base = um
  modified_base 18: mod_base = um
  modified_base 19: mod_base = OTHER; note = 2'-O-methyladenosine
  modified_base 20: mod_base = OTHER; note = 2'-O-methyladenosine
  modified_base 21: mod_base = OTHER; note = 2'-O-methyladenosine
  source 1..21: mol_type = other RNA
aggctagagaagaaagttaaa

SEQ ID NO: 1381 - RNA, 21 nt, synthetic construct
  modified_base 1: mod_base = gm
  modified_base 2: mod_base = OTHER; note = 2'-O-methyladenosine
  modified_base 3: mod_base = OTHER; note = 2'-O-methyladenosine
  modified_base 4: mod_base = um
  modified_base 5: mod_base = gm
  modified_base 6: mod_base = OTHER; note = 2'-O-methyladenosine
  modified_base 7: mod_base = cm
  modified_base 8: mod_base = OTHER; note = 2'-O-methyladenosine
  modified_base 9: mod_base = OTHER; note = 2'-fluoroadenosine
  modified_base 10: mod_base = OTHER; note = 2'-fluoroguanosine
  modified_base 11: mod_base = OTHER; note = 2'-fluoroadenosine
  modified_base 12: mod_base = cm
  modified_base 13: mod_base = OTHER; note = 2'-O-methyladenosine
  modified_base 14: mod_base = gm
  modified_base 15: mod_base = gm
  modified_base 16: mod_base = OTHER; note = 2'-O-methyladenosine
  modified_base 17: mod_base = um
  modified_base 18: mod_base = um
  modified_base 19: mod_base = cm
  modified_base 20: mod_base = um
  modified_base 21: mod_base = OTHER; note = 2'-O-methyladenosine
  source 1..21: mol_type = other RNA
gaatgacaagacaggattcta

SEQ ID NO: 1382 - RNA, 21 nt, synthetic construct
  modified_base 1: mod_base = gm
  modified_base 2: mod_base = um
  modified_base 3: mod_base = gm
  modified_base 4: mod_base = OTHER; note = 2'-O-methyladenosine
  modified_base 5: mod_base = cm
  modified_base 6: mod_base = OTHER; note = 2'-O-methyladenosine
  modified_base 7: mod_base = OTHER; note = 2'-O-methyladenosine
  modified_base 8: mod_base = gm
  modified_base 9: mod_base = OTHER; note = 2'-fluoroadenosine
  modified_base 10: mod_base = OTHER; note = 2'-fluorocytidine
  modified_base 11: mod_base = OTHER; note = 2'-fluoroadenosine
  modified_base 12: mod_base = gm
  modified_base 13: mod_base = gm
  modified_base 14: mod_base = OTHER; note = 2'-O-methyladenosine
  modified_base 15: mod_base = um
  modified_base 16: mod_base = um
  modified_base 17: mod_base = cm
  modified_base 18: mod_base = um
  modified_base 19: mod_base = gm
  modified_base 20: mod_base = OTHER; note = 2'-O-methyladenosine
  modified_base 21: mod_base = OTHER; note = 2'-O-methyladenosine
  source 1..21: mol_type = other RNA
gtgacaagacaggattctgaa

SEQ ID NO: 1383 - RNA, 20 nt, synthetic construct
  modified_base 1: mod_base = cm
  modified_base 2: mod_base = cm
  modified_base 3: mod_base = um
  modified_base 4: mod_base = gm
  modified_base 5: mod_base = gm
  modified_base 6: mod_base = OTHER; note = 2'-O-methyladenosine
  modified_base 7: mod_base = OTHER; note = 2'-fluoroadenosine
  modified_base 8: mod_base = um
  modified_base 9: mod_base = OTHER; note = 2'-fluoroadenosine
  modified_base 10: mod_base = OTHER; note = 2'-fluorouridine
  modified_base 11: mod_base = OTHER; note = 2'-fluorouridine
  modified_base 12: mod_base = OTHER; note = 2'-fluoroadenosine
  modified_base 13: mod_base = gm
  modified_base 14: mod_base = OTHER; note = 2'-O-methyladenosine
  modified_base 15: mod_base = um
  modified_base 16: mod_base = gm
  modified_base 17: mod_base = cm
  modified_base 18: mod_base = cm
  modified_base 19: mod_base = um
  modified_base 20: mod_base = um
  source 1..20: mol_type = other RNA
cctggaatattagatgcctt

SEQ ID NO: 1384 - RNA, 21 nt, synthetic construct
  modified_base 1: mod_base = OTHER; note = 2'-O-methyladenosine
  modified_base 2: mod_base = OTHER; note = 2'-O-methyladenosine
  modified_base 3: mod_base = cm
  modified_base 4: mod_base = gm
  modified_base 5: mod_base = OTHER; note = 2'-O-methyladenosine
  modified_base 6: mod_base = cm
  modified_base 7: mod_base = OTHER; note = 2'-O-methyladenosine
  modified_base 8: mod_base = OTHER; note = 2'-O-methyladenosine
  modified_base 9: mod_base = OTHER; note = 2'-fluoroguanosine
  modified_base 10: mod_base = OTHER; note = 2'-fluoroadenosine
  modified_base 11: mod_base = OTHER; note = 2'-fluorocytidine
  modified_base 12: mod_base = OTHER; note = 2'-O-methyladenosine
  modified_base 13: mod_base = gm
  modified_base 14: mod_base = gm
  modified_base 15: mod_base = OTHER; note = 2'-O-methyladenosine
  modified_base 16: mod_base = um
  modified_base 17: mod_base = um
  modified_base 18: mod_base = cm
  modified_base 19: mod_base = um
  modified_base 20: mod_base = gm
  modified_base 21: mod_base = um
  source 1..21: mol_type = other RNA
aacgacaagacaggattctgt

SEQ ID NO: 1385 - RNA, 21 nt, synthetic construct
  modified_base 1: mod_base = OTHER; note = 2'-O-methyladenosine
  modified_base 2: mod_base = OTHER; note = 2'-O-methyladenosine
  modified_base 3: mod_base = cm
  modified_base 4: mod_base = gm
  modified_base 5: mod_base = OTHER; note = 2'-O-methyladenosine
  modified_base 6: mod_base = cm
  modified_base 7: mod_base = OTHER; note = 2'-O-methyladenosine
  modified_base 8: mod_base = OTHER; note = 2'-O-methyladenosine
  modified_base 9: mod_base = OTHER; note = 2'-fluoroguanosine
  modified_base 10: mod_base = OTHER; note = 2'-fluoroadenosine
  modified_base 11: mod_base = OTHER; note = 2'-fluorocytidine
  modified_base 12: mod_base = OTHER; note = 2'-O-methyladenosine
  modified_base 13: mod_base = gm
  modified_base 14: mod_base = gm
  modified_base 15: mod_base = OTHER; note = 2'-O-methyladenosine
  modified_base 16: mod_base = um
  modified_base 17: mod_base = um
  modified_base 18: mod_base = cm
  modified_base 19: mod_base = um
  modified_base 20: mod_base = gm
  modified_base 21: mod_base = um
  source 1..21: mol_type = other RNA
aacgacaagacaggattctgt

SEQ ID NO: 1386 - RNA, 21 nt, synthetic construct
  modified_base 1: mod_base = OTHER; note = 2'-O-methyladenosine
  modified_base 2: mod_base = OTHER; note = 2'-O-methyladenosine
  modified_base 3: mod_base = cm
  modified_base 4: mod_base = gm
  modified_base 5: mod_base = OTHER; note = 2'-O-methyladenosine
  modified_base 6: mod_base = cm
  modified_base 7: mod_base = OTHER; note = 2'-O-methyladenosine
  modified_base 8: mod_base = OTHER; note = 2'-O-methyladenosine
  modified_base 9: mod_base = OTHER; note = 2'-fluoroguanosine
  modified_base 10: mod_base = OTHER; note = 2'-fluoroadenosine
  modified_base 11: mod_base = OTHER; note = 2'-fluorocytidine
  modified_base 12: mod_base = OTHER; note = 2'-O-methyladenosine
  modified_base 13: mod_base = gm
  modified_base 14: mod_base = gm
  modified_base 15: mod_base = OTHER; note = 2'-O-methyladenosine
  modified_base 16: mod_base = um
  modified_base 17: mod_base = um
  modified_base 18: mod_base = cm
  modified_base 19: mod_base = um
  modified_base 20: mod_base = gm
  modified_base 21: mod_base = um
  source 1..21: mol_type = other RNA
aacgacaagacaggattctgt

SEQ ID NO: 1387 - RNA, 21 nt, synthetic construct
  modified_base 1: mod_base = OTHER; note = 2'-O-methyladenosine
  modified_base 2: mod_base = OTHER; note = 2'-O-methyladenosine
  modified_base 3: mod_base = cm
  modified_base 4: mod_base = gm
  modified_base 5: mod_base = OTHER; note = 2'-O-methyladenosine
  modified_base 6: mod_base = cm
  modified_base 7: mod_base = OTHER; note = 2'-O-methyladenosine
  modified_base 8: mod_base = OTHER; note = 2'-O-methyladenosine
  modified_base 9: mod_base = OTHER; note = 2'-fluoroguanosine
  modified_base 10: mod_base = OTHER; note = 2'-fluoroadenosine
  modified_base 11: mod_base = OTHER; note = 2'-fluorocytidine
  modified_base 12: mod_base = OTHER; note = 2'-O-methyladenosine
  modified_base 13: mod_base = gm
  modified_base 14: mod_base = gm
  modified_base 15: mod_base = OTHER; note = 2'-O-methyladenosine
  modified_base 16: mod_base = um
  modified_base 17: mod_base = um
  modified_base 18: mod_base = cm
  modified_base 19: mod_base = um
  modified_base 20: mod_base = gm
  modified_base 21: mod_base = um
  source 1..21: mol_type = other RNA
aacgacaagacaggattctgt

SEQ ID NO: 1388 - RNA, 21 nt, synthetic construct
  modified_base 1: mod_base = OTHER; note = 2'-O-methyladenosine
  modified_base 2: mod_base = OTHER; note = 2'-O-methyladenosine
  modified_base 3: mod_base = cm
  modified_base 4: mod_base = gm
  modified_base 5: mod_base = OTHER; note = 2'-O-methyladenosine
  modified_base 6: mod_base = cm
  modified_base 7: mod_base = OTHER; note = 2'-O-methyladenosine
  modified_base 8: mod_base = OTHER; note = 2'-O-methyladenosine
  modified_base 9: mod_base = OTHER; note = 2'-fluoroguanosine
  modified_base 10: mod_base = OTHER; note = 2'-fluoroadenosine
  modified_base 11: mod_base = OTHER; note = 2'-fluorocytidine
  modified_base 12: mod_base = OTHER; note = 2'-O-methyladenosine
  modified_base 13: mod_base = gm
  modified_base 14: mod_base = gm
  modified_base 15: mod_base = OTHER; note = 2'-O-methyladenosine
  modified_base 16: mod_base = um
  modified_base 17: mod_base = um
  modified_base 18: mod_base = cm
  modified_base 19: mod_base = um
  modified_base 20: mod_base = gm
  modified_base 21: mod_base = um
  source 1..21: mol_type = other RNA
aacgacaagacaggattctgt

SEQ ID NO: 1389 - RNA, 21 nt, synthetic construct
  modified_base 1: mod_base = gm
  modified_base 2: mod_base = OTHER; note = 2'-O-methyladenosine
  modified_base 3: mod_base = um
  modified_base 4: mod_base = um
  modified_base 5: mod_base = OTHER; note = 2'-O-methyladenosine
  modified_base 6: mod_base = um
  modified_base 7: mod_base = gm
  modified_base 8: mod_base = gm
  modified_base 9: mod_base = OTHER; note = 2'-fluoroadenosine
  modified_base 10: mod_base = OTHER; note = 2'-fluoroadenosine
  modified_base 11: mod_base = OTHER; note = 2'-fluorouridine
  modified_base 12: mod_base = OTHER; note = 2'-O-methyladenosine
  modified_base 13: mod_base = gm
  modified_base 14: mod_base = gm
  modified_base 15: mod_base = um
  modified_base 16: mod_base = cm
  modified_base 17: mod_base = um
  modified_base 18: mod_base = um
  modified_base 19: mod_base = um
  modified_base 20: mod_base = cm
  modified_base 21: mod_base = OTHER; note = 2'-O-methyladenosine
  source 1..21: mol_type = other RNA
gattatggaataggtctttca

SEQ ID NO: 1390 - RNA, 21 nt, synthetic construct
  modified_base 1: mod_base = um
  modified_base 2: mod_base = cm
  modified_base 3: mod_base = OTHER; note = 2'-O-methyladenosine
  modified_base 4: mod_base = gm
  modified_base 5: mod_base = um
  modified_base 6: mod_base = gm
  modified_base 7: mod_base = cm
  modified_base 8: mod_base = OTHER; note = 2'-O-methyladenosine
  modified_base 9: mod_base = OTHER; note = 2'-fluoroguanosine
  modified_base 10: mod_base = OTHER; note = 2'-fluorocytidine
  modified_base 11: mod_base = OTHER; note = 2'-fluorocytidine
  modified_base 12: mod_base = um
  modified_base 13: mod_base = OTHER; note = 2'-O-methyladenosine
  modified_base 14: mod_base = cm
  modified_base 15: mod_base = OTHER; note = 2'-O-methyladenosine
  modified_base 16: mod_base = cm
  modified_base 17: mod_base = OTHER; note = 2'-O-methyladenosine
  modified_base 18: mod_base = OTHER; note = 2'-O-methyladenosine
  modified_base 19: mod_base = OTHER; note = 2'-O-methyladenosine
  modified_base 20: mod_base = gm
  modified_base 21: mod_base = OTHER; note = 2'-O-methyladenosine
  source 1..21: mol_type = other RNA
tcagtgcagcctacacaaaga

SEQ ID NO: 1391 - RNA, 21 nt, synthetic construct
  modified_base 1: mod_base = cm
  modified_base 2: mod_base = gm
  modified_base 3: mod_base = cm
  modified_base 4: mod_base = um
  modified_base 5: mod_base = gm
  modified_base 6: mod_base = gm
  modified_base 7: mod_base = OTHER; note = 2'-O-methyladenosine
  modified_base 8: mod_base = OTHER; note = 2'-O-methyladenosine
  modified_base 9: mod_base = OTHER; note = 2'-fluoroadenosine
  modified_base 10: mod_base = OTHER; note = 2'-fluorocytidine
  modified_base 11: mod_base = OTHER; note = 2'-fluoroadenosine
  modified_base 12: mod_base = cm
  modified_base 13: mod_base = um
  modified_base 14: mod_base = gm
  modified_base 15: mod_base = OTHER; note = 2'-O-methyladenosine
  modified_base 16: mod_base = OTHER; note = 2'-O-methyladenosine
  modified_base 17: mod_base = gm
  modified_base 18: mod_base = OTHER; note = 2'-O-methyladenosine
  modified_base 19: mod_base = gm
  modified_base 20: mod_base = um
  modified_base 21: mod_base = um
  source 1..21: mol_type = other RNA
cgctggaaacactgaagagtt

SEQ ID NO: 1392 - RNA, 21 nt, synthetic construct
  modified_base 1: mod_base = gm
  modified_base 2: mod_base = um
  modified_base 3: mod_base = gm
  modified_base 4: mod_base = gm
  modified_base 5: mod_base = gm
  modified_base 6: mod_base = OTHER; note = 2'-O-methyladenosine
  modified_base 7: mod_base = gm
  modified_base 8: mod_base = OTHER; note = 2'-O-methyladenosine
  modified_base 9: mod_base = OTHER; note = 2'-fluorocytidine
  modified_base 10: mod_base = OTHER; note = 2'-fluorocytidine
  modified_base 11: mod_base = OTHER; note = 2'-fluorocytidine
  modified_base 12: mod_base = um
  modified_base 13: mod_base = gm
  modified_base 14: mod_base = um
  modified_base 15: mod_base = gm
  modified_base 16: mod_base = um
  modified_base 17: mod_base = OTHER; note = 2'-O-methyladenosine
  modified_base 18: mod_base = cm
  modified_base 19: mod_base = cm
  modified_base 20: mod_base = um
  modified_base 21: mod_base = OTHER; note = 2'-O-methyladenosine
  source 1..21: mol_type = other RNA
gtgggagaccctgtgtaccta

SEQ ID NO: 1393 - RNA, 21 nt, synthetic construct
  modified_base 1: mod_base = gm
  modified_base 2: mod_base = OTHER; note = 2'-O-methyladenosine
  modified_base 3: mod_base = um
  modified_base 4: mod_base = um
  modified_base 5: mod_base = OTHER; note = 2'-O-methyladenosine
  modified_base 6: mod_base = um
  modified_base 7: mod_base = gm
  modified_base 8: mod_base = gm
  modified_base 9: mod_base = OTHER; note = 2'-fluoroadenosine
  modified_base 10: mod_base = OTHER; note = 2'-fluoroadenosine
  modified_base 11: mod_base = OTHER; note = 2'-fluorouridine
  modified_base 12: mod_base = OTHER; note = 2'-O-methyladenosine
  modified_base 13: mod_base = gm
  modified_base 14: mod_base = um
  modified_base 15: mod_base = um
  modified_base 16: mod_base = cm
  modified_base 17: mod_base = um
  modified_base 18: mod_base = um
  modified_base 19: mod_base = um
  modified_base 20: mod_base = cm
  modified_base 21: mod_base = OTHER; note = 2'-O-methyladenosine
  source 1..21: mol_type = other RNA
gattatggaatagttctttca

SEQ ID NO: 1394 - RNA, 21 nt, synthetic construct
  modified_base 1: mod_base = OTHER; note = 2'-O-methyladenosine
  modified_base 2: mod_base = OTHER; note = 2'-O-methyladenosine
  modified_base 3: mod_base = cm
  modified_base 4: mod_base = gm
  modified_base 5: mod_base = OTHER; note = 2'-O-methyladenosine
  modified_base 6: mod_base = cm
  modified_base 7: mod_base = OTHER; note = 2'-O-methyladenosine
  modified_base 8: mod_base = OTHER; note = 2'-O-methyladenosine
  modified_base 9: mod_base = OTHER; note = 2'-fluoroguanosine
  modified_base 10: mod_base = OTHER; note = 2'-fluoroadenosine
  modified_base 11: mod_base = OTHER; note = 2'-fluorocytidine
  modified_base 12: mod_base = OTHER; note = 2'-O-methyladenosine
  modified_base 13: mod_base = gm
  modified_base 14: mod_base = gm
  modified_base 15: mod_base = OTHER; note = 2'-O-methyladenosine
  modified_base 16: mod_base = um
  modified_base 17: mod_base = um
  modified_base 18: mod_base = cm
  modified_base 19: mod_base = um
  modified_base 20: mod_base = gm
  modified_base 21: mod_base = OTHER; note = 2'-O-methyladenosine
  source 1..21: mol_type = other RNA
aacgacaagacaggattctga

SEQ ID NO: 1395 - RNA, 21 nt, synthetic construct
  modified_base 1: mod_base = gm
  modified_base 2: mod_base = OTHER; note = 2'-O-methyladenosine
  modified_base 3: mod_base = um
  modified_base 4: mod_base = gm
  modified_base 5: mod_base = OTHER; note = 2'-O-methyladenosine
  modified_base 6: mod_base = cm
  modified_base 7: mod_base = OTHER; note = 2'-O-methyladenosine
  modified_base 8: mod_base = OTHER; note = 2'-O-methyladenosine
  modified_base 9: mod_base = OTHER; note = 2'-fluoroguanosine
  modified_base 10: mod_base = OTHER; note = 2'-fluoroadenosine
  modified_base 11: mod_base = OTHER; note = 2'-fluorocytidine
  modified_base 12: mod_base = OTHER; note = 2'-O-methyladenosine
  modified_base 13: mod_base = gm
  modified_base 14: mod_base = gm
  modified_base 15: mod_base = OTHER; note = 2'-O-methyladenosine
  modified_base 16: mod_base = um
  modified_base 17: mod_base = um
  modified_base 18: mod_base = cm
  modified_base 19: mod_base = um
  modified_base 20: mod_base = gm
  modified_base 21: mod_base = OTHER; note = 2'-O-methyladenosine
  source 1..21: mol_type = other RNA
gatgacaagacaggattctga

SEQ ID NO: 1396 - RNA, 21 nt, synthetic construct
  modified_base 1: mod_base = OTHER; note = 2'-O-methyladenosine
  modified_base 2: mod_base = OTHER; note = 2'-O-methyladenosine
  modified_base 3: mod_base = cm
  modified_base 4: mod_base = gm
  modified_base 5: mod_base = OTHER; note = 2'-O-methyladenosine
  modified_base 6: mod_base = cm
  modified_base 7: mod_base = OTHER; note = 2'-O-methyladenosine
  modified_base 8: mod_base = OTHER; note = 2'-O-methyladenosine
  modified_base 9: mod_base = OTHER; note = 2'-fluoroguanosine
  modified_base 10: mod_base = OTHER; note = 2'-fluoroadenosine
  modified_base 11: mod_base = OTHER; note = 2'-fluorocytidine
  modified_base 12: mod_base = OTHER; note = 2'-O-methyladenosine
  modified_base 13: mod_base = gm
  modified_base 14: mod_base = gm
  modified_base 15: mod_base = OTHER; note = 2'-O-methyladenosine
  modified_base 16: mod_base = um
  modified_base 17: mod_base = um
  modified_base 18: mod_base = cm
  modified_base 19: mod_base = um
  modified_base 20: mod_base = gm
  modified_base 21: mod_base = um
  source 1..21: mol_type = other RNA
aacgacaagacaggattctgt

SEQ ID NO: 1397 - RNA, 21 nt, synthetic construct
  modified_base 1: mod_base = OTHER; note = 2'-O-methyladenosine
  modified_base 2: mod_base = cm
  modified_base 3: mod_base = cm
  modified_base 4: mod_base = OTHER; note = 2'-O-methyladenosine
  modified_base 5: mod_base = gm
  modified_base 6: mod_base = gm
  modified_base 7: mod_base = OTHER; note = 2'-O-methyladenosine
  modified_base 8: mod_base = gm
  modified_base 9: mod_base = OTHER; note = 2'-fluoroguanosine
  modified_base 10: mod_base = OTHER; note = 2'-fluoroguanosine
  modified_base 11: mod_base = OTHER; note = 2'-fluoroadenosine
  modified_base 12: mod_base = OTHER; note = 2'-O-methyladenosine
  modified_base 13: mod_base = OTHER; note = 2'-O-methyladenosine
  modified_base 14: mod_base = cm
  modified_base 15: mod_base = OTHER; note = 2'-O-methyladenosine
  modified_base 16: mod_base = um
  modified_base 17: mod_base = gm
  modified_base 18: mod_base = gm
  modified_base 19: mod_base = um
  modified_base 20: mod_base = um
  modified_base 21: mod_base = OTHER; note = 2'-O-methyladenosine
  source 1..21: mol_type = other RNA
accaggagggaaacatggtta

SEQ ID NO: 1398 - RNA, 21 nt, synthetic construct
  modified_base 1: mod_base = gm
  modified_base 2: mod_base = OTHER; note = 2'-O-methyladenosine
  modified_base 3: mod_base = um
  modified_base 4: mod_base = OTHER; note = 2'-O-methyladenosine
  modified_base 5: mod_base = OTHER; note = 2'-O-methyladenosine
  modified_base 6: mod_base = cm
  modified_base 7: mod_base = cm
  modified_base 8: mod_base = OTHER; note = 2'-O-methyladenosine
  modified_base 9: mod_base = OTHER; note = 2'-fluoroguanosine
  modified_base 10: mod_base = OTHER; note = 2'-fluorocytidine
  modified_base 11: mod_base = OTHER; note = 2'-fluorouridine
  modified_base 12: mod_base = um
  modified_base 13: mod_base = cm
  modified_base 14: mod_base = cm
  modified_base 15: mod_base = um
  modified_base 16: mod_base = gm
  modified_base 17: mod_base = OTHER; note = 2'-O-methyladenosine
  modified_base 18: mod_base = OTHER; note = 2'-O-methyladenosine
  modified_base 19: mod_base = gm
  modified_base 20: mod_base = um
  modified_base 21: mod_base = OTHER; note = 2'-O-methyladenosine
  source 1..21: mol_type = other RNA
gataaccagcttcctgaagta

SEQ ID NO: 1399 - RNA, 21 nt, synthetic construct
  modified_base 1: mod_base = cm
  modified_base 2: mod_base = OTHER; note = 2'-O-methyladenosine
  modified_base 3: mod_base = um
  modified_base 4: mod_base = cm
  modified_base 5: mod_base = OTHER; note = 2'-O-methyladenosine
  modified_base 6: mod_base = OTHER; note = 2'-O-methyladenosine
  modified_base 7: mod_base = OTHER; note = 2'-O-methyladenosine
  modified_base 8: mod_base = um
  modified_base 9: mod_base = OTHER; note = 2'-fluoroadenosine
  modified_base 10: mod_base = OTHER; note = 2'-fluoroguanosine
  modified_base 11: mod_base = OTHER; note = 2'-fluorocytidine
  modified_base 12: mod_base = OTHER; note = 2'-O-methyladenosine
  modified_base 13: mod_base = gm
  modified_base 14: mod_base = OTHER; note = 2'-O-methyladenosine
  modified_base 15: mod_base = cm
  modified_base 16: mod_base = um
  modified_base 17: mod_base = um
  modified_base 18: mod_base = gm
  modified_base 19: mod_base = um
  modified_base 20: mod_base = um
  modified_base 21: mod_base = OTHER; note = 2'-O-methyladenosine
  source 1..21: mol_type = other RNA
catcaaatagcagacttgtta

SEQ ID NO: 1400 - RNA, 21 nt, synthetic construct
  modified_base 1: mod_base = cm
  modified_base 2: mod_base = cm
  modified_base 3: mod_base = OTHER; note = 2'-O-methyladenosine
  modified_base 4: mod_base = OTHER; note = 2'-O-methyladenosine
  modified_base 5: mod_base = OTHER; note = 2'-O-methyladenosine
  modified_base 6: mod_base = um
  modified_base 7: mod_base = OTHER; note = 2'-O-methyladenosine
  modified_base 8: mod_base = gm
  modified_base 9: mod_base = OTHER; note = 2'-fluorocytidine
  modified_base 10: mod_base = OTHER; note = 2'-fluoroadenosine
  modified_base 11: mod_base = OTHER; note = 2'-fluoroguanosine
  modified_base 12: mod_base = OTHER; note = 2'-O-methyladenosine
  modified_base 13: mod_base = cm
  modified_base 14: mod_base = um
  modified_base 15: mod_base = um
  modified_base 16: mod_base = OTHER; note = 2'-O-methylinosine
  modified_base 17: mod_base = um
  modified_base 18: mod_base = um
  modified_base 19: mod_base = cm
  modified_base 20: mod_base = cm
  modified_base 21: mod_base = OTHER; note = 2'-O-methyladenosine
  source 1..21: mol_type = other RNA
ccaaatagcagacttnttcca

SEQ ID NO: 1401 - RNA, 21 nt, synthetic construct
  modified_base 1: mod_base = gm
  modified_base 2: mod_base = OTHER; note = 2'-O-methyladenosine
  modified_base 3: mod_base = gm
  modified_base 4: mod_base = gm
  modified_base 5: mod_base = OTHER; note = 2'-O-methyladenosine
  modified_base 6: mod_base = cm
  modified_base 7: mod_base = cm
  modified_base 8: mod_base = OTHER; note = 2'-O-methyladenosine
  modified_base 9: mod_base = OTHER; note = 2'-fluoroguanosine
  modified_base 10: mod_base = OTHER; note = 2'-fluoroadenosine
  modified_base 11: mod_base = OTHER; note = 2'-fluorouridine
  modified_base 12: mod_base = um
  modified_base 13: mod_base = gm
  modified_base 14: mod_base = cm
  modified_base 15: mod_base = um
  modified_base 16: mod_base = um
  modified_base 17: mod_base = OTHER; note = 2'-O-methyladenosine
  modified_base 18: mod_base = cm
  modified_base 19: mod_base = um
  modified_base 20: mod_base = cm
  modified_base 21: mod_base = OTHER; note = 2'-O-methyladenosine
  source 1..21: mol_type = other RNA
gaggaccagattgcttactca

SEQ ID NO: 1402 - RNA, 21 nt, synthetic construct
  modified_base 1: mod_base = OTHER; note = 2'-O-methyladenosine
  modified_base 2: mod_base = cm
  modified_base 3: mod_base = cm
  modified_base 4: mod_base = OTHER; note = 2'-O-methyladenosine
  modified_base 5: mod_base = gm
  modified_base 6: mod_base = OTHER; note = 2'-O-methyladenosine
  modified_base 7: mod_base = um
  modified_base 8: mod_base = um
  modified_base 9: mod_base = OTHER; note = 2'-fluoroguanosine
  modified_base 10: mod_base = OTHER; note = 2'-fluorocytidine
  modified_base 11: mod_base = OTHER; note = 2'-fluorouridine
  modified_base 12: mod_base = um
  modified_base 13: mod_base = OTHER; note = 2'-O-methyladenosine
  modified_base 14: mod_base = cm
  modified_base 15: mod_base = um
  modified_base 16: mod_base = cm
  modified_base 17: mod_base = OTHER; note = 2'-O-methyladenosine
  modified_base 18: mod_base = gm
  modified_base 19: mod_base = OTHER; note = 2'-O-methyladenosine
  modified_base 20: mod_base = cm
  modified_base 21: mod_base = OTHER; note = 2'-O-methyladenosine
  source 1..21: mol_type = other RNA
accagattgcttactcagaca

SEQ ID NO: 1403 - RNA, 21 nt, synthetic construct
  modified_base 1: mod_base = gm
  modified_base 2: mod_base = OTHER; note = 2'-O-methyladenosine
  modified_base 3: mod_base = um
  modified_base 4: mod_base = um
  modified_base 5: mod_base = gm
  modified_base 6: mod_base = cm
  modified_base 7: mod_base = um
  modified_base 8: mod_base = um
  modified_base 9: mod_base = OTHER; note = 2'-fluoroadenosine
  modified_base 10: mod_base = OTHER; note = 2'-fluorocytidine
  modified_base 11: mod_base = OTHER; note = 2'-fluorouridine
  modified_base 12: mod_base = cm
  modified_base 13: mod_base = OTHER; note = 2'-O-methyladenosine
  modified_base 14: mod_base = gm
  modified_base 15: mod_base = OTHER; note = 2'-O-methyladenosine
  modified_base 16: mod_base = cm
  modified_base 17: mod_base = OTHER; note = 2'-O-methyladenosine
  modified_base 18: mod_base = cm
  modified_base 19: mod_base = cm
  modified_base 20: mod_base = OTHER; note = 2'-O-methyladenosine
  modified_base 21: mod_base = OTHER; note = 2'-O-methyladenosine
  source 1..21: mol_type = other RNA
gattgcttactcagacaccaa

SEQ ID NO: 1404 - RNA, 21 nt, synthetic construct
  modified_base 1: mod_base = cm
  modified_base 2: mod_base = OTHER; note = 2'-O-methyladenosine
  modified_base 3: mod_base = gm
  modified_base 4: mod_base = gm
  modified_base 5: mod_base = cm
  modified_base 6: mod_base = um
  modified_base 7: mod_base = OTHER; note = 2'-O-methyladenosine
  modified_base 8: mod_base = gm
  modified_base 9: mod_base = OTHER; note = 2'-fluoroadenosine
  modified_base 10: mod_base = OTHER; note = 2'-fluoroguanosine
  modified_base 11: mod_base = OTHER; note = 2'-fluoroadenosine
  modified_base 12: mod_base = OTHER; note = 2'-O-methyladenosine
  modified_base 13: mod_base = gm
  modified_base 14: mod_base = OTHER; note = 2'-O-methyladenosine
  modified_base 15: mod_base = OTHER; note = 2'-O-methyladenosine
  modified_base 16: mod_base = OTHER; note = 2'-O-methyladenosine
  modified_base 17: mod_base = gm
  modified_base 18: mod_base = um
  modified_base 19: mod_base = um
  modified_base 20: mod_base = OTHER; note = 2'-O-methyladenosine
  modified_base 21: mod_base = OTHER; note = 2'-O-methyladenosine
  source 1..21: mol_type = other RNA
caggctagagaagaaagttaa

SEQ ID NO: 1405 - RNA, 21 nt, synthetic construct
  modified_base 1: mod_base = gm
  modified_base 2: mod_base = um
  modified_base 3: mod_base = um
  modified_base 4: mod_base = cm
  modified_base 5: mod_base = cm
  modified_base 6: mod_base = OTHER; note = 2'-O-methyladenosine
  modified_base 7: mod_base = gm
  modified_base 8: mod_base = OTHER; note = 2'-O-methyladenosine
  modified_base 9: mod_base = OTHER; note = 2'-fluorouridine
  modified_base 10: mod_base = OTHER; note = 2'-fluoroguanosine
  modified_base 11: mod_base = OTHER; note = 2'-fluorocytidine
  modified_base 12: mod_base = OTHER; note = 2'-O-methyladenosine
  modified_base 13: mod_base = um
  modified_base 14: mod_base = um
  modified_base 15: mod_base = um
  modified_base 16: mod_base = um
  modified_base 17: mod_base = OTHER; note = 2'-O-methyladenosine
  modified_base 18: mod_base = OTHER; note = 2'-O-methyladenosine
  modified_base 19: mod_base = cm
  modified_base 20: mod_base = cm
  modified_base 21: mod_base = OTHER; note = 2'-O-methyladenosine
  source 1..21: mol_type = other RNA
gttccagatgcattttaacca

SEQ ID NO: 1406 - RNA, 21 nt, synthetic construct
  modified_base 1: mod_base = um
  modified_base 2: mod_base = gm
  modified_base 3: mod_base = OTHER; note = 2'-O-methyladenosine
  modified_base 4: mod_base = cm
  modified_base 5: mod_base = cm
  modified_base 6: mod_base = cm
  modified_base 7: mod_base = um
  modified_base 8: mod_base = um
  modified_base 9: mod_base = OTHER; note = 2'-fluorocytidine
  modified_base 10: mod_base = OTHER; note = 2'-fluoroadenosine
  modified_base 11: mod_base = OTHER; note = 2'-fluoroguanosine
  modified_base 12: mod_base = OTHER; note = 2'-O-methyladenosine
  modified_base 13: mod_base = OTHER; note = 2'-O-methyladenosine
  modified_base 14: mod_base = cm
  modified_base 15: mod_base = gm
  modified_base 16: mod_base = OTHER; note = 2'-O-methyladenosine
  modified_base 17: mod_base = OTHER; note = 2'-O-methyladenosine
  modified_base 18: mod_base = OTHER; note = 2'-O-methyladenosine
  modified_base 19: mod_base = gm
  modified_base 20: mod_base = um
  modified_base 21: mod_base = um
  source 1..21: mol_type = other RNA
tgacccttcagaacgaaagtt

SEQ ID NO: 1407 - RNA, 21 nt, synthetic construct
  modified_base 1: mod_base = cm
  modified_base 2: mod_base = OTHER; note = 2'-O-methyladenosine
  modified_base 3: mod_base = gm
  modified_base 4: mod_base = OTHER; note = 2'-O-methyladenosine
  modified_base 5: mod_base = OTHER; note = 2'-O-methyladenosine
  modified_base 6: mod_base = cm
  modified_base 7: mod_base = gm
  modified_base 8: mod_base = OTHER; note = 2'-O-methyladenosine
  modified_base 9: mod_base = OTHER; note = 2'-fluoroadenosine
  modified_base 10: mod_base = OTHER; note = 2'-fluoroadenosine
  modified_base 11: mod_base = OTHER; note = 2'-fluoroguanosine
  modified_base 12: mod_base = um
  modified_base 13: mod_base = um
  modified_base 14: mod_base = OTHER; note = 2'-O-methyladenosine
  modified_base 15: mod_base = um
  modified_base 16: mod_base = OTHER; note = 2'-O-methyladenosine
  modified_base 17: mod_base = um
  modified_base 18: mod_base = gm
  modified_base 19: mod_base = gm
  modified_base 20: mod_base = OTHER; note = 2'-O-methyladenosine
  modified_base 21: mod_base = OTHER; note = 2'-O-methyladenosine
  source 1..21: mol_type = other RNA
cagaacgaaagttatatggaa

SEQ ID NO: 1408 - RNA, 21 nt, synthetic construct
  modified_base 1: mod_base = cm
  modified_base 2: mod_base = gm
  modified_base 3: mod_base = OTHER; note = 2'-O-methyladenosine
  modified_base 4: mod_base = OTHER; note = 2'-O-methyladenosine
  modified_base 5: mod_base = OTHER; note = 2'-O-methyladenosine
  modified_base 6: mod_base = gm
  modified_base 7: mod_base = um
  modified_base 8: mod_base = um
  modified_base 9: mod_base = OTHER; note = 2'-fluoroadenosine
  modified_base 10: mod_base = OTHER; note = 2'-fluorouridine
  modified_base 11: mod_base = OTHER; note = 2'-fluoroadenosine
  modified_base 12: mod_base = um
  modified_base 13: mod_base = gm
  modified_base 14: mod_base = gm
  modified_base 15: mod_base = OTHER; note = 2'-O-methyladenosine
  modified_base 16: mod_base = OTHER; note = 2'-O-methyladenosine
  modified_base 17: mod_base = OTHER; note = 2'-O-methyladenosine
  modified_base 18: mod_base = OTHER; note = 2'-O-methyladenosine
  modified_base 19: mod_base = um
  modified_base 20: mod_base = cm
  modified_base 21: mod_base = OTHER; note = 2'-O-methyladenosine
  source 1..21: mol_type = other RNA
cgaaagttatatggaaaatca

SEQ ID NO: 1409 - RNA, 21 nt, synthetic construct
  modified_base 1: mod_base = cm
  modified_base 2: mod_base = OTHER; note = 2'-O-methyladenosine
  modified_base 3: mod_base = um
  modified_base 4: mod_base = gm
  modified_base 5: mod_base = gm
  modified_base 6: mod_base = OTHER; note = 2'-O-methyladenosine
  modified_base 7: mod_base = OTHER; note = 2'-O-methyladenosine
  modified_base 8: mod_base = OTHER; note = 2'-O-methyladenosine
  modified_base 9: mod_base = OTHER; note = 2'-fluoroadenosine
  modified_base 10: mod_base = OTHER; note = 2'-fluorouridine
  modified_base 11: mod_base = OTHER; note = 2'-fluorocytidine
  modified_base 12: mod_base = OTHER; note = 2'-O-methyladenosine
  modified_base 13: mod_base = cm
  modified_base 14: mod_base = cm
  modified_base 15: mod_base = OTHER; note = 2'-O-methyladenosine
  modified_base 16: mod_base = cm
  modified_base 17: mod_base = um
  modified_base 18: mod_base = cm
  modified_base 19: mod_base = um
  modified_base 20: mod_base = um
  modified_base 21: mod_base = um
  source 1..21: mol_type = other RNA
catggaaaatcaccactcttt

SEQ ID NO: 1410 - RNA, 21 nt, synthetic construct
  modified_base 1: mod_base = gm
  modified_base 2: mod_base = um
  modified_base 3: mod_base = gm
  modified_base 4: mod_base = um
  modified_base 5: mod_base = cm
  modified_base 6: mod_base = cm
  modified_base 7: mod_base = um
  modified_base 8: mod_base = gm
  modified_base 9: mod_base = OTHER; note = 2'-fluoroguanosine
  modified_base 10: mod_base = OTHER; note = 2'-fluoroadenosine
  modified_base 11: mod_base = OTHER; note = 2'-fluoroadenosine
  modified_base 12: mod_base = um
  modified_base 13: mod_base = OTHER; note = 2'-O-methyladenosine
  modified_base 14: mod_base = um
  modified_base 15: mod_base = um
  modified_base 16: mod_base = OTHER; note = 2'-O-methyladenosine
  modified_base 17: mod_base = gm
  modified_base 18: mod_base = OTHER; note = 2'-O-methyladenosine
  modified_base 19: mod_base = um
  modified_base 20: mod_base = gm
  modified_base 21: mod_base = OTHER; note = 2'-O-methyladenosine
  source 1..21: mol_type = other RNA
gtgtcctggaatattagatga

SEQ ID NO: 1411 - RNA, 21 nt, synthetic construct
  modified_base 1: mod_base = gm
  modified_base 2: mod_base = um
  modified_base 3: mod_base = um
  modified_base 4: mod_base = cm
  modified_base 5: mod_base = um
  modified_base 6: mod_base = cm
  modified_base 7: mod_base = OTHER; note = 2'-O-methyladenosine
  modified_base 8: mod_base = OTHER; note = 2'-O-methyladenosine
  modified_base 9: mod_base = OTHER; note = 2'-fluoroadenosine
  modified_base 10: mod_base = OTHER; note = 2'-fluoroadenosine
  modified_base 11: mod_base = OTHER; note = 2'-fluoroadenosine
  modified_base 12: mod_base = um
  modified_base 13: mod_base = gm
  modified_base 14: mod_base = OTHER; note = 2'-O-methyladenosine
  modified_base 15: mod_base = cm
  modified_base 16: mod_base = OTHER; note = 2'-O-methyladenosine
  modified_base 17: mod_base = OTHER; note = 2'-O-methyladenosine
  modified_base 18: mod_base = cm
  modified_base 19: mod_base = OTHER; note = 2'-O-methyladenosine
  modified_base 20: mod_base = cm
  modified_base 21: mod_base = um
  source 1..21: mol_type = other RNA
gttctcaaaaatgacaacact

SEQ ID NO: 1412 - RNA, 21 nt, synthetic construct
  modified_base 1: mod_base = gm
  modified_base 2: mod_base = OTHER; note = 2'-O-methyladenosine
  modified_base 3: mod_base = um
  modified_base 4: mod_base = gm
  modified_base 5: mod_base = OTHER; note = 2'-O-methyladenosine
  modified_base 6: mod_base = cm
  modified_base 7: mod_base = OTHER; note = 2'-O-methyladenosine
  modified_base 8: mod_base = OTHER; note = 2'-O-methyladenosine
  modified_base 9: mod_base = OTHER; note = 2'-fluorocytidine
  modified_base 10: mod_base = OTHER; note = 2'-fluoroadenosine
  modified_base 11: mod_base = OTHER; note = 2'-fluorocytidine
  modified_base 12: mod_base = um
  modified_base 13: mod_base = um
  modified_base 14: mod_base = gm
  modified_base 15: mod_base = OTHER; note = 2'-O-methyladenosine
  modified_base 16: mod_base = OTHER; note = 2'-O-methyladenosine
  modified_base 17: mod_base = gm
  modified_base 18: mod_base = cm
  modified_base 19: mod_base = OTHER; note = 2'-O-methyladenosine
  modified_base 20: mod_base = um
  modified_base 21: mod_base = OTHER; note = 2'-O-methyladenosine
  source 1..21: mol_type = other RNA
gatgacaacacttgaagcata

SEQ ID NO: 1413 - RNA, 21 nt, synthetic construct
  modified_base 1: mod_base = gm
  modified_base 2: mod_base = cm
  modified_base 3: mod_base = OTHER; note = 2'-O-methyladenosine
  modified_base 4: mod_base = OTHER; note = 2'-O-methyladenosine
  modified_base 5: mod_base = cm
  modified_base 6: mod_base = OTHER; note = 2'-O-methyladenosine
  modified_base 7: mod_base = cm
  modified_base 8: mod_base = um
  modified_base 9: mod_base = OTHER; note = 2'-fluorouridine
  modified_base 10: mod_base = OTHER; note = 2'-fluoroguanosine
  modified_base 11: mod_base = OTHER; note = 2'-fluoroadenosine
  modified_base 12: mod_base = OTHER; note = 2'-O-methyladenosine
  modified_base 13: mod_base = gm
  modified_base 14: mod_base = cm
  modified_base 15: mod_base = OTHER; note = 2'-O-methyladenosine
  modified_base 16: mod_base = um
  modified_base 17: mod_base = gm
  modified_base 18: mod_base = gm
  modified_base 19: mod_base = um
  modified_base 20: mod_base = gm
  modified_base 21: mod_base = um
  source 1..21: mol_type = other RNA
gcaacacttgaagcatggtgt

SEQ ID NO: 1414 - RNA, 21 nt, synthetic construct
  modified_base 1: mod_base = gm
  modified_base 2: mod_base = OTHER; note = 2'-O-methyladenosine
  modified_base 3: mod_base = OTHER; note = 2'-O-methyladenosine
  modified_base 4: mod_base = gm
  modified_base 5: mod_base = cm
  modified_base 6: mod_base = OTHER; note = 2'-O-methyladenosine
  modified_base 7: mod_base = um
  modified_base 8: mod_base = gm
  modified_base 9: mod_base = OTHER; note = 2'-fluoroguanosine
  modified_base 10: mod_base = OTHER; note = 2'-fluorouridine
  modified_base 11: mod_base = OTHER; note = 2'-fluoroguanosine
  modified_base 12: mod_base = um
  modified_base 13: mod_base = um
  modified_base 14: mod_base = um
  modified_base 15: mod_base = cm
  modified_base 16: mod_base = OTHER; note = 2'-O-methyladenosine
  modified_base 17: mod_base = gm
  modified_base 18: mod_base = OTHER; note = 2'-O-methyladenosine
  modified_base 19: mod_base = OTHER; note = 2'-O-methyladenosine
  modified_base 20: mod_base = cm
  modified_base 21: mod_base = um
  source 1..21: mol_type = other RNA
gaagcatggtgtttcagaact

SEQ ID NO: 1415 - RNA, 21 nt, synthetic construct
  modified_base 1: mod_base = um
  modified_base 2: mod_base = gm
  modified_base 3: mod_base = gm
  modified_base 4: mod_base = um
  modified_base 5: mod_base = gm
  modified_base 6: mod_base = um
  modified_base 7: mod_base = cm
  modified_base 8: mod_base = um
  modified_base 9: mod_base = OTHER; note = 2'-fluorocytidine
  modified_base 10: mod_base = OTHER; note = 2'-fluoroadenosine
  modified_base 11: mod_base = OTHER; note = 2'-fluoroadenosine
  modified_base 12: mod_base = um
  modified_base 13: mod_base = gm
  modified_base 14: mod_base = cm
  modified_base 15: mod_base = um
  modified_base 16: mod_base = um
  modified_base 17: mod_base = cm
  modified_base 18: mod_base = OTHER; note = 2'-O-methyladenosine
  modified_base 19: mod_base = OTHER; note = 2'-O-methyladenosine
  modified_base 20: mod_base = um
  modified_base 21: mod_base = OTHER; note = 2'-O-methyladenosine
  source 1..21: mol_type = other RNA
tggtgtctcaatgcttcaata

SEQ ID NO: 1416 - RNA, 21 nt, synthetic construct
  modified_base 1: mod_base = cm
  modified_base 2: mod_base = gm
  modified_base 3: mod_base = um
  modified_base 4: mod_base = cm
  modified_base 5: mod_base = um
  modified_base 6: mod_base = cm
  modified_base 7: mod_base = OTHER; note = 2'-O-methyladenosine
  modified_base 8: mod_base = OTHER; note = 2'-O-methyladenosine
  modified_base 9: mod_base = OTHER; note = 2'-fluorouridine
  modified_base 10: mod_base = OTHER; note = 2'-fluoroguanosine
  modified_base 11: mod_base = OTHER; note = 2'-fluorocytidine
  modified_base 12: mod_base = um
  modified_base 13: mod_base = um
  modified_base 14: mod_base = cm
  modified_base 15: mod_base = OTHER; note = 2'-O-methyladenosine
  modified_base 16: mod_base = OTHER; note = 2'-O-methyladenosine
  modified_base 17: mod_base = um
  modified_base 18: mod_base = gm
  modified_base 19: mod_base = um
  modified_base 20: mod_base = cm
  modified_base 21: mod_base = OTHER; note = 2'-O-methyladenosine
  source 1..21: mol_type = other RNA
cgtctcaatgcttcaatgtca

SEQ ID NO: 1417 - RNA, 21 nt, synthetic construct
  modified_base 1: mod_base = gm
  modified_base 2: mod_base = gm
  modified_base 3: mod_base = OTHER; note = 2'-O-methyladenosine
  modified_base 4: mod_base = cm
  modified_base 5: mod_base = OTHER; note = 2'-O-methyladenosine
  modified_base 6: mod_base = gm
  modified_base 7: mod_base = gm
  modified_base 8: mod_base = OTHER; note = 2'-O-methyladenosine
  modified_base 9: mod_base = OTHER; note = 2'-fluorouridine
  modified_base 10: mod_base = OTHER; note = 2'-fluorouridine
  modified_base 11: mod_base = OTHER; note = 2'-fluorocytidine
  modified_base 12: mod_base = um
  modified_base 13: mod_base = gm
  modified_base 14: mod_base = OTHER; note = 2'-O-methyladenosine
  modified_base 15: mod_base = OTHER; note = 2'-O-methyladenosine
  modified_base 16: mod_base = OTHER; note = 2'-O-methyladenosine
  modified_base 17: mod_base = OTHER; note = 2'-O-methyladenosine
  modified_base 18: mod_base = cm
  modified_base 19: mod_base = um
  modified_base 20: mod_base = cm
  modified_base 21: mod_base = OTHER; note = 2'-O-methyladenosine
  source 1..21: mol_type = other RNA
ggacaggattctgaaaactca

SEQ ID NO: 1418 - RNA, 21 nt, synthetic construct
  modified_base 1: mod_base = gm
  modified_base 2: mod_base = cm
  modified_base 3: mod_base = um
  modified_base 4: mod_base = gm
  modified_base 5: mod_base = OTHER; note = 2'-O-methyladenosine
  modified_base 6: mod_base = um
  modified_base 7: mod_base = um
  modified_base 8: mod_base = OTHER; note = 2'-O-methyladenosine
  modified_base 9: mod_base = OTHER; note = 2'-fluorouridine
  modified_base 10: mod_base = OTHER; note = 2'-fluoroguanosine
  modified_base 11: mod_base = OTHER; note = 2'-fluoroguanosine
  modified_base 12: mod_base = OTHER; note = 2'-O-methyladenosine
  modified_base 13: mod_base = OTHER; note = 2'-O-methyladenosine
  modified_base 14: mod_base = um
  modified_base 15: mod_base = OTHER; note = 2'-O-methyladenosine
  modified_base 16: mod_base = gm
  modified_base 17: mod_base = um
  modified_base 18: mod_base = um
  modified_base 19: mod_base = cm
  modified_base 20: mod_base = um
  modified_base 21: mod_base = um
  source 1..21: mol_type = other RNA
gctgattatggaatagttctt

SEQ ID NO: 1419 - RNA, 21 nt, synthetic construct
  modified_base 1: mod_base = gm
  modified_base 2: mod_base = OTHER; note = 2'-O-methyladenosine
  modified_base 3: mod_base = um
  modified_base 4: mod_base = um
  modified_base 5: mod_base = OTHER; note = 2'-O-methyladenosine
  modified_base 6: mod_base = um
  modified_base 7: mod_base = gm
  modified_base 8: mod_base = gm
  modified_base 9: mod_base = OTHER; note = 2'-fluoroadenosine
  modified_base 10: mod_base = OTHER; note = 2'-fluoroadenosine
  modified_base 11: mod_base = OTHER; note = 2'-fluorouridine
  modified_base 12: mod_base = OTHER; note = 2'-O-methyladenosine
  modified_base 13: mod_base = gm
  modified_base 14: mod_base = um
  modified_base 15: mod_base = um
  modified_base 16: mod_base = cm
  modified_base 17: mod_base = um
  modified_base 18: mod_base = um
  modified_base 19: mod_base = um
  modified_base 20: mod_base = cm
  modified_base 21: mod_base = um
  source 1..21: mol_type = other RNA
gattatggaatagttctttct

SEQ ID NO: 1420 - RNA, 21 nt, synthetic construct
  modified_base 1: mod_base = gm
  modified_base 2: mod_base = um
  modified_base 3: mod_base = um
  modified_base 4: mod_base = um
  modified_base 5: mod_base = um
  modified_base 6: mod_base = cm
  modified_base 7: mod_base = cm
  modified_base 8: mod_base = OTHER; note = 2'-O-methyladenosine
  modified_base 9: mod_base = OTHER; note = 2'-fluorouridine
  modified_base 10: mod_base = OTHER; note = 2'-fluoroadenosine
  modified_base 11: mod_base = OTHER; note = 2'-fluoroguanosine
  modified_base 12: mod_base = OTHER; note = 2'-O-methyladenosine
  modified_base 13: mod_base = um
  modified_base 14: mod_base = cm
  modified_base 15: mod_base = um
  modified_base 16: mod_base = OTHER; note = 2'-O-methylinosine
  modified_base 17: mod_base = gm
  modified_base 18: mod_base = OTHER; note = 2'-O-methyladenosine
  modified_base 19: mod_base = um
  modified_base 20: mod_base = cm
  modified_base 21: mod_base = um
  source 1..21: mol_type = other RNA
gttttccatagatctngatct

SEQ ID NO: 1421 - RNA, 21 nt, synthetic construct
  modified_base 1: mod_base = gm
  modified_base 2: mod_base = cm
  modified_base 3: mod_base = um
  modified_base 4: mod_base = um
  modified_base 5: mod_base = cm
  modified_base 6: mod_base = um
  modified_base 7: mod_base = cm
  modified_base 8: mod_base = OTHER; note = 2'-O-methyladenosine
  modified_base 9: mod_base = OTHER; note = 2'-fluoroguanosine
  modified_base 10: mod_base = OTHER; note = 2'-fluoroadenosine
  modified_base 11: mod_base = OTHER; note = 2'-fluorocytidine
  modified_base 12: mod_base = OTHER; note = 2'-O-methyladenosine
  modified_base 13: mod_base = gm
  modified_base 14: mod_base = cm
  modified_base 15: mod_base = OTHER; note = 2'-O-methyladenosine
  modified_base 16: mod_base = um
  modified_base 17: mod_base = um
  modified_base 18: mod_base = gm
  modified_base 19: mod_base = gm
  modified_base 20: mod_base = OTHER; note = 2'-O-methyladenosine
  modified_base 21: mod_base = um
  source 1..21: mol_type = other RNA
gcttctcagacagcattggat

SEQ ID NO: 1422 - RNA, 21 nt, synthetic construct
  modified_base 1: mod_base = gm
  modified_base 2: mod_base = gm
  modified_base 3: mod_base = cm
  modified_base 4: mod_base = OTHER; note = 2'-O-methyladenosine
  modified_base 5: mod_base = um
  modified_base 6: mod_base = um
  modified_base 7: mod_base = gm
  modified_base 8: mod_base = gm
  modified_base 9: mod_base = OTHER; note = 2'-fluoroadenosine
  modified_base 10: mod_base = OTHER; note = 2'-fluorouridine
  modified_base 11: mod_base = OTHER; note = 2'-fluorouridine
  modified_base 12: mod_base = um
  modified_base 13: mod_base = cm
  modified_base 14: mod_base = cm
  modified_base 15: mod_base = um
  modified_base 16: mod_base = OTHER; note = 2'-O-methyladenosine
  modified_base 17: mod_base = OTHER; note = 2'-O-methyladenosine
  modified_base 18: mod_base = OTHER; note = 2'-O-methyladenosine
  modified_base 19: mod_base = gm
  modified_base 20: mod_base = gm
  modified_base 21: mod_base = um
  source 1..21: mol_type = other RNA
ggcattggatttcctaaaggt

SEQ ID NO: 1423 - RNA, 21 nt, synthetic construct
  modified_base 1: mod_base = cm
  modified_base 2: mod_base = OTHER; note = 2'-O-methyladenosine
  modified_base 3: mod_base = um
  modified_base 4: mod_base = um
  modified_base 5: mod_base = gm
  modified_base 6: mod_base = gm
  modified_base 7: mod_base = OTHER; note = 2'-O-methyladenosine
  modified_base 8: mod_base = um
  modified_base 9: mod_base = OTHER; note = 2'-fluorouridine
  modified_base 10: mod_base = OTHER; note = 2'-fluorouridine
  modified_base 11: mod_base = OTHER; note = 2'-fluorocytidine
  modified_base 12: mod_base = cm
  modified_base 13: mod_base = um
  modified_base 14: mod_base = OTHER; note = 2'-O-methyladenosine
  modified_base 15: mod_base = OTHER; note = 2'-O-methyladenosine
  modified_base 16: mod_base = OTHER; note = 2'-O-methyladenosine
  modified_base 17: mod_base = gm
  modified_base 18: mod_base = gm
  modified_base 19: mod_base = um
  modified_base 20: mod_base = OTHER; note = 2'-O-methylinosine
  modified_base 21: mod_base = OTHER; note = 2'-O-methyladenosine
  source 1..21: mol_type = other RNA
cattggatttcctaaaggtna

SEQ ID NO: 1424 - RNA, 21 nt, synthetic construct
  modified_base 1: mod_base = cm
  modified_base 2: mod_base = OTHER; note = 2'-O-methyladenosine
  modified_base 3: mod_base = um
  modified_base 4: mod_base = gm
  modified_base 5: mod_base = um
  modified_base 6: mod_base = cm
  modified_base 7: mod_base = OTHER; note = 2'-O-methyladenosine
  modified_base 8: mod_base = gm
  modified_base 9: mod_base = OTHER; note = 2'-fluorouridine
  modified_base 10: mod_base = OTHER; note = 2'-fluorouridine
  modified_base 11: mod_base = OTHER; note = 2'-fluoroguanosine
  modified_base 12: mod_base = um
  modified_base 13: mod_base = um
  modified_base 14: mod_base = um
  modified_base 15: mod_base = OTHER; note = 2'-O-methyladenosine
  modified_base 16: mod_base = OTHER; note = 2'-O-methyladenosine
  modified_base 17: mod_base = OTHER; note = 2'-O-methyladenosine
  modified_base 18: mod_base = OTHER; note = 2'-O-methyladenosine
  modified_base 19: mod_base = cm
  modified_base 20: mod_base = cm
  modified_base 21: mod_base = OTHER; note = 2'-O-methyladenosine
  source 1..21: mol_type = other RNA
catgtcagttgtttaaaacca

SEQ ID NO: 1425 - RNA, 21 nt, synthetic construct
  modified_base 1: mod_base = gm
  modified_base 2: mod_base = um
  modified_base 3: mod_base = OTHER; note = 2'-O-methyladenosine
  modified_base 4: mod_base = OTHER; note = 2'-O-methyladenosine
  modified_base 5: mod_base = cm
  modified_base 6: mod_base = um
  modified_base 7: mod_base = cm
  modified_base 8: mod_base = um
  modified_base 9: mod_base = OTHER; note = 2'-fluoroadenosine
  modified_base 10: mod_base = OTHER; note = 2'-fluoroadenosine
  modified_base 11: mod_base = OTHER; note = 2'-fluoroguanosine
  modified_base 12: mod_base = OTHER; note = 2'-O-methyladenosine
  modified_base 13: mod_base = um
  modified_base 14: mod_base = cm
  modified_base 15: mod_base = um
  modified_base 16: mod_base = gm
  modified_base 17: mod_base = OTHER; note = 2'-O-methyladenosine
  modified_base 18: mod_base = um
  modified_base 19: mod_base = gm
  modified_base 20: mod_base = OTHER; note = 2'-O-methyladenosine
  modified_base 21: mod_base = OTHER; note = 2'-O-methyladenosine
  source 1..21: mol_type = other RNA
gtaactctaagatctgatgaa

SEQ ID NO: 1426 - RNA, 21 nt, synthetic construct
  modified_base 1: mod_base = cm
  modified_base 2: mod_base = OTHER; note = 2'-O-methyladenosine
  modified_base 3: mod_base = OTHER; note = 2'-O-methyladenosine
  modified_base 4: mod_base = cm
  modified_base 5: mod_base = um
  modified_base 6: mod_base = cm
  modified_base 7: mod_base = um
  modified_base 8: mod_base = OTHER; note = 2'-O-methyladenosine
  modified_base 9: mod_base = OTHER; note = 2'-fluoroadenosine
  modified_base 10: mod_base = OTHER; note = 2'-fluoroguanosine
  modified_base 11: mod_base = OTHER; note = 2'-fluoroadenosine
  modified_base 12: mod_base = um
  modified_base 13: mod_base = cm
  modified_base 14: mod_base = um
  modified_base 15: mod_base = gm
  modified_base 16: mod_base = OTHER; note = 2'-O-methyladenosine
  modified_base 17: mod_base = um
  modified_base 18: mod_base = gm
  modified_base 19: mod_base = OTHER; note = 2'-O-methyladenosine
  modified_base 20: mod_base = OTHER; note = 2'-O-methyladenosine
  modified_base 21: mod_base = OTHER; note = 2'-O-methyladenosine
  source 1..21: mol_type = other RNA
caactctaagatctgatgaaa

SEQ ID NO: 1427 - RNA, 21 nt, synthetic construct
  modified_base 1: mod_base = um
  modified_base 2: mod_base = gm
  modified_base 3: mod_base = gm
  modified_base 4: mod_base = gm
  modified_base 5: mod_base = OTHER; note = 2'-O-methyladenosine
  modified_base 6: mod_base = OTHER; note = 2'-O-methyladenosine
  modified_base 7: mod_base = gm
  modified_base 8: mod_base = um
  modified_base 9: mod_base = OTHER; note = 2'-fluorouridine
  modified_base 10: mod_base = OTHER; note = 2'-fluoroguanosine
  modified_base 11: mod_base = OTHER; note = 2'-fluoroadenosine
  modified_base 12: mod_base = cm
  modified_base 13: mod_base = um
  modified_base 14: mod_base = OTHER; note = 2'-O-methyladenosine
  modified_base 15: mod_base = OTHER; note = 2'-O-methyladenosine
  modified_base 16: mod_base = OTHER; note = 2'-O-methyladenosine
  modified_base 17: mod_base = cm
  modified_base 18: mod_base = um
  modified_base 19: mod_base = um
  modified_base 20: mod_base = gm
  modified_base 21: mod_base = OTHER; note = 2'-O-methyladenosine
  source 1..21: mol_type = other RNA
tgggaagttgactaaacttga

SEQ ID NO: 1428 - RNA, 21 nt, synthetic construct
  modified_base 1: mod_base = gm
  modified_base 2: mod_base = cm
  modified_base 3: mod_base = um
  modified_base 4: mod_base = gm
  modified_base 5: mod_base = um
  modified_base 6: mod_base = gm
  modified_base 7: mod_base = OTHER; note = 2'-O-methyladenosine
  modified_base 8: mod_base = OTHER; note = 2'-O-methyladenosine
  modified_base 9: mod_base = OTHER; note = 2'-fluorouridine
  modified_base 10: mod_base = OTHER; note = 2'-fluoroadenosine
  modified_base 11: mod_base = OTHER; note = 2'-fluoroadenosine
  modified_base 12: mod_base = OTHER; note = 2'-O-methyladenosine
  modified_base 13: mod_base = um
  modified_base 14: mod_base = gm
  modified_base 15: mod_base = gm
  modified_base 16: mod_base = OTHER; note = 2'-O-methyladenosine
  modified_base 17: mod_base = OTHER; note = 2'-O-methyladenosine
  modified_base 18: mod_base = gm
  modified_base 19: mod_base = cm
  modified_base 20: mod_base = um
  modified_base 21: mod_base = OTHER; note = 2'-O-methyladenosine
  source 1..21: mol_type = other RNA
gctgtgaataaatggaagcta

SEQ ID NO: 1429 - RNA, 21 nt, synthetic construct
  modified_base 1: mod_base = cm
  modified_base 2: mod_base = OTHER; note = 2'-O-methyladenosine
  modified_base 3: mod_base = gm
  modified_base 4: mod_base = gm
  modified_base 5: mod_base = um
  modified_base 6: mod_base = um
  modified_base 7: mod_base = um
  modified_base 8: mod_base = um
  modified_base 9: mod_base = OTHER; note = 2'-fluoroguanosine
  modified_base 10: mod_base = OTHER; note = 2'-fluoroguanosine
  modified_base 11: mod_base = OTHER; note = 2'-fluorocytidine
  modified_base 12: mod_base = um
  modified_base 13: mod_base = um
  modified_base 14: mod_base = gm
  modified_base 15: mod_base = um
  modified_base 16: mod_base = gm
  modified_base 17: mod_base = OTHER; note = 2'-O-methyladenosine
  modified_base 18: mod_base = um
  modified_base 19: mod_base = cm
  modified_base 20: mod_base = OTHER; note = 2'-O-methyladenosine
  modified_base 21: mod_base = OTHER; note = 2'-O-methyladenosine
  source 1..21: mol_type = other RNA
caggttttggcttgtgatcaa

SEQ ID NO: 1430 - RNA, 21 nt, synthetic construct
  modified_base 1: mod_base = um
  modified_base 2: mod_base = um
  modified_base 3: mod_base = cm
  modified_base 4: mod_base = OTHER; note = 2'-O-methyladenosine
  modified_base 5: mod_base = gm
  modified_base 6: mod_base = gm
  modified_base 7: mod_base = OTHER; note = 2'-O-methyladenosine
  modified_base 8: mod_base = um
  modified_base 9: mod_base = OTHER; note = 2'-fluoroguanosine
  modified_base 10: mod_base = OTHER; note = 2'-fluorocytidine
  modified_base 11: mod_base = OTHER; note = 2'-fluoroguanosine
  modified_base 12: mod_base = OTHER; note = 2'-O-methyladenosine
  modified_base 13: mod_base = um
  modified_base 14: mod_base = gm
  modified_base 15: mod_base = um
  modified_base 16: mod_base = cm
  modified_base 17: mod_base = um
  modified_base 18: mod_base = OTHER; note = 2'-O-methyladenosine
  modified_base 19: mod_base = um
  modified_base 20: mod_base = gm
  modified_base 21: mod_base = OTHER; note = 2'-O-methyladenosine
  source 1..21: mol_type = other RNA
ttcaggatgcgatgtctatga

SEQ ID NO: 1431 - RNA, 21 nt, synthetic construct
  modified_base 1: mod_base = um
  modified_base 2: mod_base = gm
  modified_base 3: mod_base = gm
  modified_base 4: mod_base = OTHER; note = 2'-O-methyladenosine
  modified_base 5: mod_base = OTHER; note = 2'-O-methyladenosine
  modified_base 6: mod_base = OTHER; note = 2'-O-methyladenosine
  modified_base 7: mod_base = OTHER; note = 2'-O-methyladenosine
  modified_base 8: mod_base = um
  modified_base 9: mod_base = OTHER; note = 2'-fluorocytidine
  modified_base 10: mod_base = OTHER; note = 2'-fluoroadenosine
  modified_base 11: mod_base = OTHER; note = 2'-fluorocytidine
  modified_base 12: mod_base = cm
  modified_base 13: mod_base = OTHER; note = 2'-O-methyladenosine
  modified_base 14: mod_base = cm
  modified_base 15: mod_base = um
  modified_base 16: mod_base = cm
  modified_base 17: mod_base = um
  modified_base 18: mod_base = um
  modified_base 19: mod_base = um
  modified_base 20: mod_base = gm
  modified_base 21: mod_base = OTHER; note = 2'-O-methyladenosine
  source 1..21: mol_type = other RNA
tggaaaatcaccactctttga

SEQ ID NO: 1432 - RNA, 21 nt, synthetic construct
  modified_base 1: mod_base = um
  modified_base 2: mod_base = um
  modified_base 3: mod_base = gm
  modified_base 4: mod_base = OTHER; note = 2'-O-methyladenosine
  modified_base 5: mod_base = OTHER; note = 2'-O-methyladenosine
  modified_base 6: mod_base = gm
  modified_base 7: mod_base = cm
  modified_base 8: mod_base = OTHER; note = 2'-O-methyladenosine
  modified_base 9: mod_base = OTHER; note = 2'-fluorouridine
  modified_base 10: mod_base = OTHER; note = 2'-fluoroguanosine
  modified_base 11: mod_base = OTHER; note = 2'-fluoroguanosine
  modified_base 12: mod_base = um
  modified_base 13: mod_base = gm
  modified_base 14: mod_base = um
  modified_base 15: mod_base = um
  modified_base 16: mod_base = um
  modified_base 17: mod_base = cm
  modified_base 18: mod_base = OTHER; note = 2'-O-methyladenosine
  modified_base 19: mod_base = gm
  modified_base 20: mod_base = OTHER; note = 2'-O-methyladenosine
  modified_base 21: mod_base = OTHER; note = 2'-O-methyladenosine
  source 1..21: mol_type = other RNA
ttgaagcatggtgtttcagaa

SEQ ID NO: 1433 - RNA, 21 nt, synthetic construct
  modified_base 1: mod_base = OTHER; note = 2'-O-methyladenosine
  modified_base 2: mod_base = OTHER; note = 2'-O-methyladenosine
  modified_base 3: mod_base = um
  modified_base 4: mod_base = gm
  modified_base 5: mod_base = OTHER; note = 2'-O-methyladenosine
  modified_base 6: mod_base = cm
  modified_base 7: mod_base = OTHER; note = 2'-O-methyladenosine
  modified_base 8: mod_base = OTHER; note = 2'-O-methyladenosine
  modified_base 9: mod_base = OTHER; note = 2'-fluoroguanosine
  modified_base 10: mod_base = OTHER; note = 2'-fluoroadenosine
  modified_base 11: mod_base = OTHER; note = 2'-fluorocytidine
  modified_base 12: mod_base = OTHER; note = 2'-O-methyladenosine
  modified_base 13: mod_base = gm
  modified_base 14: mod_base = gm
  modified_base 15: mod_base = OTHER; note = 2'-O-methyladenosine
  modified_base 16: mod_base = um
  modified_base 17: mod_base = um
  modified_base 18: mod_base = cm
  modified_base 19: mod_base = um
  modified_base 20: mod_base = gm
  modified_base 21: mod_base = OTHER; note = 2'-O-methyladenosine
  source 1..21: mol_type = other RNA
aatgacaagacaggattctga

SEQ ID NO: 1434 - RNA, 21 nt, synthetic construct
  modified_base 1: mod_base = cm
  modified_base 2: mod_base = um
  modified_base 3: mod_base = gm
  modified_base 4: mod_base = cm
  modified_base 5: mod_base = um
  modified_base 6: mod_base = um
  modified_base 7: mod_base = cm
  modified_base 8: mod_base = um
  modified_base 9: mod_base = OTHER; note = 2'-fluorocytidine
  modified_base 10: mod_base = OTHER; note = 2'-fluoroadenosine
  modified_base 11: mod_base = OTHER; note = 2'-fluoroguanosine
  modified_base 12: mod_base = OTHER; note = 2'-O-methyladenosine
  modified_base 13: mod_base = cm
  modified_base 14: mod_base = OTHER; note = 2'-O-methyladenosine
  modified_base 15: mod_base = gm
  modified_base 16: mod_base = cm
  modified_base 17: mod_base = OTHER; note = 2'-O-methyladenosine
  modified_base 18: mod_base = um
  modified_base 19: mod_base = um
  modified_base 20: mod_base = gm
  modified_base 21: mod_base = OTHER; note = 2'-O-methyladenosine
  source 1..21: mol_type = other RNA
ctgcttctcagacagcattga

SEQ ID NO: 1435 - RNA, 21 nt, synthetic construct
  modified_base 1: mod_base = cm
  modified_base 2: mod_base = um
  modified_base 3: mod_base = OTHER; note = 2'-O-methyladenosine
  modified_base 4: mod_base = cm
  modified_base 5: mod_base = um
  modified_base 6: mod_base = gm
  modified_base 7: mod_base = OTHER; note = 2'-O-methyladenosine
  modified_base 8: mod_base = OTHER; note = 2'-O-methyladenosine
  modified_base 9: mod_base = OTHER; note = 2'-fluoroadenosine
  modified_base 10: mod_base = OTHER; note = 2'-fluoroadenosine
  modified_base 11: mod_base = OTHER; note = 2'-fluorocytidine
  modified_base 12: mod_base = cm
  modified_base 13: mod_base = um
  modified_base 14: mod_base = um
  modified_base 15: mod_base = um
  modified_base 16: mod_base = OTHER; note = 2'-O-methyladenosine
  modified_base 17: mod_base = OTHER; note = 2'-O-methyladenosine
  modified_base 18: mod_base = OTHER; note = 2'-O-methyladenosine
  modified_base 19: mod_base = gm
  modified_base 20: mod_base = gm
  modified_base 21: mod_base = OTHER; note = 2'-O-methyladenosine
  source 1..21: mol_type = other RNA
ctactgaaaacctttaaagga

SEQ ID NO: 1436 - RNA, 21 nt, synthetic construct
  modified_base 1: mod_base = OTHER; note = 2'-O-methyladenosine
  modified_base 2: mod_base = cm
  modified_base 3: mod_base = um
  modified_base 4: mod_base = cm
  modified_base 5: mod_base = um
  modified_base 6: mod_base = OTHER; note = 2'-O-methyladenosine
  modified_base 7: mod_base = OTHER; note = 2'-O-methyladenosine
  modified_base 8: mod_base = gm
  modified_base 9: mod_base = OTHER; note = 2'-fluoroadenosine
  modified_base 10: mod_base = OTHER; note = 2'-fluorouridine
  modified_base 11: mod_base = OTHER; note = 2'-fluorocytidine
  modified_base 12: mod_base = um
  modified_base 13: mod_base = gm
  modified_base 14: mod_base = OTHER; note = 2'-O-methyladenosine
  modified_base 15: mod_base = um
  modified_base 16: mod_base = gm
  modified_base 17: mod_base = OTHER; note = 2'-O-methyladenosine
  modified_base 18: mod_base = OTHER; note = 2'-O-methyladenosine
  modified_base 19: mod_base = gm
  modified_base 20: mod_base = um
  modified_base 21: mod_base = OTHER; note = 2'-O-methyladenosine
  source 1..21: mol_type = other RNA
actctaagatctgatgaagta

SEQ ID NO: 1437 - RNA, 21 nt, synthetic construct
  modified_base 1: mod_base = um
  modified_base 2: mod_base = um
  modified_base 3: mod_base = gm
  modified_base 4: mod_base = gm
  modified_base 5: mod_base = gm
  modified_base 6: mod_base = OTHER; note = 2'-O-methyladenosine
  modified_base 7: mod_base = OTHER; note = 2'-O-methyladenosine
  modified_base 8: mod_base = gm
  modified_base 9: mod_base = OTHER; note = 2'-fluorouridine
  modified_base 10: mod_base = OTHER; note = 2'-fluorouridine
  modified_base 11: mod_base = OTHER; note = 2'-fluoroguanosine
  modified_base 12: mod_base = OTHER; note = 2'-O-methyladenosine
  modified_base 13: mod_base = cm
  modified_base 14: mod_base = um
  modified_base 15: mod_base = OTHER; note = 2'-O-methyladenosine
  modified_base 16: mod_base = OTHER; note = 2'-O-methyladenosine
  modified_base 17: mod_base = OTHER; note = 2'-O-methyladenosine
  modified_base 18: mod_base = cm
  modified_base 19: mod_base = um
  modified_base 20: mod_base = um
  modified_base 21: mod_base = OTHER; note = 2'-O-methyladenosine
  source 1..21: mol_type = other RNA
ttgggaagttgactaaactta

SEQ ID NO: 1438 - RNA, 21 nt, synthetic construct
  modified_base 1: mod_base = cm
  modified_base 2: mod_base = um
  modified_base 3: mod_base = gm
  modified_base 4: mod_base = cm
  modified_base 5: mod_base = um
  modified_base 6: mod_base = um
  modified_base 7: mod_base = cm
  modified_base 8: mod_base = um
  modified_base 9: mod_base = OTHER; note = 2'-fluorocytidine
  modified_base 10: mod_base = OTHER; note = 2'-fluoroadenosine
  modified_base 11: mod_base = OTHER; note = 2'-fluoroguanosine
  modified_base 12: mod_base = OTHER; note = 2'-O-methyladenosine
  modified_base 13: mod_base = cm
  modified_base 14: mod_base = OTHER; note = 2'-O-methyladenosine
  modified_base 15: mod_base = gm
  modified_base 16: mod_base = um
  modified_base 17: mod_base = OTHER; note = 2'-O-methyladenosine
  modified_base 18: mod_base = um
  modified_base 19: mod_base = um
  modified_base 20: mod_base = gm
  modified_base 21: mod_base = OTHER; note = 2'-O-methyladenosine
  source 1..21: mol_type = other RNA
ctgcttctcagacagtattga

SEQ ID NO: 1439 - RNA, 21 nt, synthetic construct
  modified_base 1: mod_base = OTHER; note = 2'-O-methyladenosine
  modified_base 2: mod_base = cm
  modified_base 3: mod_base = um
  modified_base 4: mod_base = cm
  modified_base 5: mod_base = um
  modified_base 6: mod_base = cm
  modified_base 7: mod_base = OTHER; note = 2'-O-methyladenosine
  modified_base 8: mod_base = gm
  modified_base 9: mod_base = OTHER; note = 2'-fluorouridine
  modified_base 10: mod_base = OTHER; note = 2'-fluoroguanosine
  modified_base 11: mod_base = OTHER; note = 2'-fluorocytidine
  modified_base 12: mod_base = OTHER; note = 2'-O-methyladenosine
  modified_base 13: mod_base = gm
  modified_base 14: mod_base = cm
  modified_base 15: mod_base = cm
  modified_base 16: mod_base = um
  modified_base 17: mod_base = OTHER; note = 2'-O-methyladenosine
  modified_base 18: mod_base = cm
  modified_base 19: mod_base = OTHER; note = 2'-O-methyladenosine
  modified_base 20: mod_base = cm
  modified_base 21: mod_base = OTHER; note = 2'-O-methyladenosine
  source 1..21: mol_type = other RNA
actctcagtgcagcctacaca

SEQ ID NO: 1440 - RNA, 21 nt, synthetic construct
  modified_base 1: mod_base = cm
  modified_base 2: mod_base = um
  modified_base 3: mod_base = cm
  modified_base 4: mod_base = um
  modified_base 5: mod_base = cm
  modified_base 6: mod_base = OTHER; note = 2'-O-methyladenosine
  modified_base 7: mod_base = gm
  modified_base 8: mod_base = um
  modified_base 9: mod_base = OTHER; note = 2'-fluoroguanosine
  modified_base 10: mod_base = OTHER; note = 2'-fluorocytidine
  modified_base 11: mod_base = OTHER; note = 2'-fluoroadenosine
  modified_base 12: mod_base = gm
  modified_base 13: mod_base = cm
  modified_base 14: mod_base = cm
  modified_base 15: mod_base = um
  modified_base 16: mod_base = OTHER; note = 2'-O-methyladenosine
  modified_base 17: mod_base = cm
  modified_base 18: mod_base = OTHER; note = 2'-O-methyladenosine
  modified_base 19: mod_base = cm
  modified_base 20: mod_base = OTHER; note = 2'-O-methyladenosine
  modified_base 21: mod_base = OTHER; note = 2'-O-methyladenosine
  source 1..21: mol_type = other RNA
ctctcagtgcagcctacacaa

SEQ ID NO: 1441 - RNA, 21 nt, synthetic construct
  modified_base 1: mod_base = um
  modified_base 2: mod_base = cm
  modified_base 3: mod_base = OTHER; note = 2'-O-methyladenosine
  modified_base 4: mod_base = gm
  modified_base 5: mod_base = um
  modified_base 6: mod_base = gm
  modified_base 7: mod_base = cm
  modified_base 8: mod_base = OTHER; note = 2'-O-methyladenosine
  modified_base 9: mod_base = OTHER; note = 2'-fluoroguanosine
  modified_base 10: mod_base = OTHER; note = 2'-fluorocytidine
  modified_base 11: mod_base = OTHER; note = 2'-fluorocytidine
  modified_base 12: mod_base = um
  modified_base 13: mod_base = OTHER; note = 2'-O-methyladenosine
  modified_base 14: mod_base = cm
  modified_base 15: mod_base = OTHER; note = 2'-O-methyladenosine
  modified_base 16: mod_base = cm
  modified_base 17: mod_base = OTHER; note = 2'-O-methyladenosine
  modified_base 18: mod_base = OTHER; note = 2'-O-methyladenosine
  modified_base 19: mod_base = OTHER; note = 2'-O-methyladenosine
  modified_base 20: mod_base = gm
  modified_base 21: mod_base = OTHER; note = 2'-O-methyladenosine
  source 1..21: mol_type = other RNA
tcagtgcagcctacacaaaga

SEQ ID NO: 1442 - RNA, 21 nt, synthetic construct
  modified_base 1: mod_base = OTHER; note = 2'-O-methyladenosine
  modified_base 2: mod_base = gm
  modified_base 3: mod_base = um
  modified_base 4: mod_base = gm
  modified_base 5: mod_base = cm
  modified_base 6: mod_base = OTHER; note = 2'-O-methyladenosine
  modified_base 7: mod_base = gm
  modified_base 8: mod_base = cm
  modified_base 9: mod_base = OTHER; note = 2'-fluorocytidine
  modified_base 10: mod_base = OTHER; note = 2'-fluorouridine
  modified_base 11: mod_base = OTHER; note = 2'-fluoroadenosine
  modified_base 12: mod_base = cm
  modified_base 13: mod_base = OTHER; note = 2'-O-methyladenosine
  modified_base 14: mod_base = cm
  modified_base 15: mod_base = OTHER; note = 2'-O-methyladenosine
  modified_base 16: mod_base = OTHER; note = 2'-O-methyladenosine
  modified_base 17: mod_base = OTHER; note = 2'-O-methyladenosine
  modified_base 18: mod_base = gm
  modified_base 19: mod_base = gm
  modified_base 20: mod_base = OTHER; note = 2'-O-methyladenosine
  modified_base 21: mod_base = OTHER; note = 2'-O-methyladenosine
  source 1..21: mol_type = other RNA
agtgcagcctacacaaaggaa

SEQ ID NO: 1443 - RNA, 21 nt, synthetic construct
  modified_base 1: mod_base = um
  modified_base 2: mod_base = OTHER; note = 2'-O-methyladenosine
  modified_base 3: mod_base = cm
  modified_base 4: mod_base = cm
  modified_base 5: mod_base = gm
  modified_base 6: mod_base = cm
  modified_base 7: mod_base = cm
  modified_base 8: mod_base = um
  modified_base 9: mod_base = OTHER; note = 2'-fluoroguanosine
  modified_base 10: mod_base = OTHER; note = 2'-fluoroguanosine
  modified_base 11: mod_base = OTHER; note = 2'-fluorouridine
  modified_base 12: mod_base = gm
  modified_base 13: mod_base = cm
  modified_base 14: mod_base = OTHER; note = 2'-O-methyladenosine
  modified_base 15: mod_base = cm
  modified_base 16: mod_base = um
  modified_base 17: mod_base = um
  modified_base 18: mod_base = cm
  modified_base 19: mod_base = gm
  modified_base 20: mod_base = OTHER; note = 2'-O-methyladenosine
  modified_base 21: mod_base = OTHER; note = 2'-O-methyladenosine
  source 1..21: mol_type = other RNA
taccgcctggtgcacttcgaa

SEQ ID NO: 1444 - RNA, 21 nt, synthetic construct
  modified_base 1: mod_base = OTHER; note = 2'-O-methyladenosine
  modified_base 2: mod_base = cm
  modified_base 3: mod_base = cm
  modified_base 4: mod_base = gm
  modified_base 5: mod_base = cm
  modified_base 6: mod_base = cm
  modified_base 7: mod_base = um
  modified_base 8: mod_base = gm
  modified_base 9: mod_base = OTHER; note = 2'-fluoroguanosine
  modified_base 10: mod_base = OTHER; note = 2'-fluorouridine
  modified_base 11: mod_base = OTHER; note = 2'-fluoroguanosine
  modified_base 12: mod_base = cm
  modified_base 13: mod_base = OTHER; note = 2'-O-methyladenosine
  modified_base 14: mod_base = cm
  modified_base 15: mod_base = um
  modified_base 16: mod_base = um
  modified_base 17: mod_base = cm
  modified_base 18: mod_base = gm
  modified_base 19: mod_base = OTHER; note = 2'-O-methyladenosine
  modified_base 20: mod_base = gm
  modified_base 21: mod_base = OTHER; note = 2'-O-methyladenosine
  source 1..21: mol_type = other RNA
accgcctggtgcacttcgaga

SEQ ID NO: 1445 - RNA, 21 nt, synthetic construct
  modified_base 1: mod_base = cm
  modified_base 2: mod_base = cm
  modified_base 3: mod_base = gm
  modified_base 4: mod_base = cm
  modified_base 5: mod_base = cm
  modified_base 6: mod_base = um
  modified_base 7: mod_base = gm
  modified_base 8: mod_base = gm
  modified_base 9: mod_base = OTHER; note = 2'-fluorouridine
  modified_base 10: mod_base = OTHER; note = 2'-fluoroguanosine
  modified_base 11: mod_base = OTHER; note = 2'-fluorocytidine
  modified_base 12: mod_base = OTHER; note = 2'-O-methyladenosine
  modified_base 13: mod_base = cm
  modified_base 14: mod_base = um
  modified_base 15: mod_base = um
  modified_base 16: mod_base = cm
  modified_base 17: mod_base = gm
  modified_base 18: mod_base = OTHER; note = 2'-O-methyladenosine
  modified_base 19: mod_base = gm
  modified_base 20: mod_base = cm
  modified_base 21: mod_base = OTHER; note = 2'-O-methyladenosine
  source 1..21: mol_type = other RNA
ccgcctggtgcacttcgagca

SEQ ID NO: 1446 - RNA, 21 nt, synthetic construct
  modified_base 1: mod_base = cm
  modified_base 2: mod_base = gm
  modified_base 3: mod_base = cm
  modified_base 4: mod_base = cm
  modified_base 5: mod_base = um
  modified_base 6: mod_base = gm
  modified_base 7: mod_base = gm
  modified_base 8: mod_base = um
  modified_base 9: mod_base = OTHER; note = 2'-fluoroguanosine
  modified_base 10: mod_base = OTHER; note = 2'-fluorocytidine
  modified_base 11: mod_base = OTHER; note = 2'-fluoroadenosine
  modified_base 12: mod_base = cm
  modified_base 13: mod_base = um
  modified_base 14: mod_base = um
  modified_base 15: mod_base = cm
  modified_base 16: mod_base = gm
  modified_base 17: mod_base = OTHER; note = 2'-O-methyladenosine
  modified_base 18: mod_base = gm
  modified_base 19: mod_base = cm
  modified_base 20: mod_base = cm
  modified_base 21: mod_base = um
  source 1..21: mol_type = other RNA
cgcctggtgcacttcgagcct

SEQ ID NO: 1447 - RNA, 21 nt, synthetic construct
  modified_base 1: mod_base = cm
  modified_base 2: mod_base = gm
  modified_base 3: mod_base = cm
  modified_base 4: mod_base = um
  modified_base 5: mod_base = gm
  modified_base 6: mod_base = gm
  modified_base 7: mod_base = OTHER; note = 2'-O-methyladenosine
  modified_base 8: mod_base = OTHER; note = 2'-O-methyladenosine
  modified_base 9: mod_base = OTHER; note = 2'-fluoroadenosine
  modified_base 10: mod_base = OTHER; note = 2'-fluorocytidine
  modified_base 11: mod_base = OTHER; note = 2'-fluoroadenosine
  modified_base 12: mod_base = cm
  modified_base 13: mod_base = um
  modified_base 14: mod_base = gm
  modified_base 15: mod_base = OTHER; note = 2'-O-methyladenosine
  modified_base 16: mod_base = OTHER; note = 2'-O-methyladenosine
  modified_base 17: mod_base = gm
  modified_base 18: mod_base = OTHER; note = 2'-O-methyladenosine
  modified_base 19: mod_base = gm
  modified_base 20: mod_base = um
  modified_base 21: mod_base = um
  source 1..21: mol_type = other RNA
cgctggaaacactgaagagtt

SEQ ID NO: 1448 - RNA, 21 nt, synthetic construct
  modified_base 1: mod_base = OTHER; note = 2'-O-methyladenosine
  modified_base 2: mod_base = um
  modified_base 3: mod_base = cm
  modified_base 4: mod_base = OTHER; note = 2'-O-methyladenosine
  modified_base 5: mod_base = OTHER; note = 2'-O-methyladenosine
  modified_base 6: mod_base = OTHER; note = 2'-O-methyladenosine
  modified_base 7: mod_base = gm
  modified_base 8: mod_base = um
  modified_base 9: mod_base = OTHER; note = 2'-fluoroguanosine
  modified_base 10: mod_base = OTHER; note = 2'-fluoroguanosine
  modified_base 11: mod_base = OTHER; note = 2'-fluoroguanosine
  modified_base 12: mod_base = OTHER; note = 2'-O-methyladenosine
  modified_base 13: mod_base = gm
  modified_base 14: mod_base = OTHER; note = 2'-O-methyladenosine
  modified_base 15: mod_base = cm
  modified_base 16: mod_base = cm
  modified_base 17: mod_base = cm
  modified_base 18: mod_base = um
  modified_base 19: mod_base = gm
  modified_base 20: mod_base = um
  modified_base 21: mod_base = OTHER; note = 2'-O-methyladenosine
  source 1..21: mol_type = other RNA
atcaaagtgggagaccctgta

SEQ ID NO: 1449 - RNA, 21 nt, synthetic construct
  modified_base 1: mod_base = um
  modified_base 2: mod_base = cm
  modified_base 3: mod_base = OTHER; note = 2'-O-methyladenosine
  modified_base 4: mod_base = OTHER; note = 2'-O-methyladenosine
  modified_base 5: mod_base = OTHER; note = 2'-O-methyladenosine
  modified_base 6: mod_base = gm
  modified_base 7: mod_base = um
  modified_base 8: mod_base = gm
  modified_base 9: mod_base = OTHER; note = 2'-fluoroguanosine
  modified_base 10: mod_base = OTHER; note = 2'-fluoroguanosine
  modified_base 11: mod_base = OTHER; note = 2'-fluoroadenosine
  modified_base 12: mod_base = gm
  modified_base 13: mod_base = OTHER; note = 2'-O-methyladenosine
  modified_base 14: mod_base = cm
  modified_base 15: mod_base = cm
  modified_base 16: mod_base = cm
  modified_base 17: mod_base = um
  modified_base 18: mod_base = gm
  modified_base 19: mod_base = um
  modified_base 20: mod_base = gm
  modified_base 21: mod_base = um
  source 1..21: mol_type = other RNA
tcaaagtgggagaccctgtgt

SEQ ID NO: 1450 - RNA, 21 nt, synthetic construct
  modified_base 1: mod_base = OTHER; note = 2'-O-methyladenosine
  modified_base 2: mod_base = OTHER; note = 2'-O-methyladenosine
  modified_base 3: mod_base = gm
  modified_base 4: mod_base = um
  modified_base 5: mod_base = gm
  modified_base 6: mod_base = gm
  modified_base 7: mod_base = gm
  modified_base 8: mod_base = OTHER; note = 2'-O-methyladenosine
  modified_base 9: mod_base = OTHER; note = 2'-fluoroguanosine
  modified_base 10: mod_base = OTHER; note = 2'-fluoroadenosine
  modified_base 11: mod_base = OTHER; note = 2'-fluorocytidine
  modified_base 12: mod_base = cm
  modified_base 13: mod_base = cm
  modified_base 14: mod_base = um
  modified_base 15: mod_base = gm
  modified_base 16: mod_base = um
  modified_base 17: mod_base = gm
  modified_base 18: mod_base = um
  modified_base 19: mod_base = OTHER; note = 2'-O-methyladenosine
  modified_base 20: mod_base = cm
  modified_base 21: mod_base = OTHER; note = 2'-O-methyladenosine
  source 1..21: mol_type = other RNA
aagtgggagaccctgtgtaca

SEQ ID NO: 1451 - RNA, 21 nt, synthetic construct
  modified_base 1: mod_base = OTHER; note = 2'-O-methyladenosine
  modified_base 2: mod_base = gm
  modified_base 3: mod_base = um
  modified_base 4: mod_base = gm
  modified_base 5: mod_base = gm
  modified_base 6: mod_base = gm
  modified_base 7: mod_base = OTHER; note = 2'-O-methyladenosine
  modified_base 8: mod_base = gm
  modified_base 9: mod_base = OTHER; note = 2'-fluoroadenosine
  modified_base 10: mod_base = OTHER; note = 2'-fluorocytidine
  modified_base 11: mod_base = OTHER; note = 2'-fluorocytidine
  modified_base 12: mod_base = cm
  modified_base 13: mod_base = um
  modified_base 14: mod_base = gm
  modified_base 15: mod_base = um
  modified_base 16: mod_base = gm
  modified_base 17: mod_base = um
  modified_base 18: mod_base = OTHER; note = 2'-O-methyladenosine
  modified_base 19: mod_base = cm
  modified_base 20: mod_base = cm
  modified_base 21: mod_base = um
  source 1..21: mol_type = other RNA
agtgggagaccctgtgtacct

SEQ ID NO: 1452 - RNA, 21 nt, synthetic construct
  modified_base 1: mod_base = gm
  modified_base 2: mod_base = um
  modified_base 3: mod_base = gm
  modified_base 4: mod_base = gm
  modified_base 5: mod_base = gm
  modified_base 6: mod_base = OTHER; note = 2'-O-methyladenosine
  modified_base 7: mod_base = gm
  modified_base 8: mod_base = OTHER; note = 2'-O-methyladenosine
  modified_base 9: mod_base = OTHER; note = 2'-fluorocytidine
  modified_base 10: mod_base = OTHER; note = 2'-fluorocytidine
  modified_base 11: mod_base = OTHER; note = 2'-fluorocytidine
  modified_base 12: mod_base = um
  modified_base 13: mod_base = gm
  modified_base 14: mod_base = um
  modified_base 15: mod_base = gm
  modified_base 16: mod_base = um
  modified_base 17: mod_base = OTHER; note = 2'-O-methyladenosine
  modified_base 18: mod_base = cm
  modified_base 19: mod_base = cm
  modified_base 20: mod_base = um
  modified_base 21: mod_base = OTHER; note = 2'-O-methyladenosine
  source 1..21: mol_type = other RNA
gtgggagaccctgtgtaccta

SEQ ID NO: 1453 - RNA, 21 nt, synthetic construct
  modified_base 1: mod_base = OTHER; note = 2'-O-methyladenosine
  modified_base 2: mod_base = um
  modified_base 3: mod_base = cm
  modified_base 4: mod_base = OTHER; note = 2'-O-methyladenosine
  modified_base 5: mod_base = OTHER; note = 2'-O-methyladenosine
  modified_base 6: mod_base = OTHER; note = 2'-O-methyladenosine
  modified_base 7: mod_base = um
  modified_base 8: mod_base = OTHER; note = 2'-O-methyladenosine
  modified_base 9: mod_base = OTHER; note = 2'-fluoroguanosine
  modified_base 10: mod_base = OTHER; note = 2'-fluorocytidine
  modified_base 11: mod_base = OTHER; note = 2'-fluoroadenosine
  modified_base 12: mod_base = gm
  modified_base 13: mod_base = OTHER; note = 2'-O-methyladenosine
  modified_base 14: mod_base = cm
  modified_base 15: mod_base = um
  modified_base 16: mod_base = um
  modified_base 17: mod_base = gm
  modified_base 18: mod_base = um
  modified_base 19: mod_base = um
  modified_base 20: mod_base = cm
  modified_base 21: mod_base = OTHER; note = 2'-O-methyladenosine
  source 1..21: mol_type = other RNA
atcaaatagcagacttgttca

SEQ ID NO: 1454 - RNA, 21 nt, synthetic construct
  modified_base 1: mod_base = cm
  modified_base 2: mod_base = um
  modified_base 3: mod_base = OTHER; note = 2'-O-methyladenosine
  modified_base 4: mod_base = gm
  modified_base 5: mod_base = OTHER; note = 2'-O-methyladenosine
  modified_base 6: mod_base = gm
  modified_base 7: mod_base = OTHER; note = 2'-O-methyladenosine
  modified_base 8: mod_base = OTHER; note = 2'-O-methyladenosine
  modified_base 9: mod_base = OTHER; note = 2'-fluoroguanosine
  modified_base 10: mod_base = OTHER; note = 2'-fluoroadenosine
  modified_base 11: mod_base = OTHER; note = 2'-fluoroadenosine
  modified_base 12: mod_base = OTHER; note = 2'-O-methyladenosine
  modified_base 13: mod_base = gm
  modified_base 14: mod_base = um
  modified_base 15: mod_base = um
  modified_base 16: mod_base = OTHER; note = 2'-O-methyladenosine
  modified_base 17: mod_base = OTHER; note = 2'-O-methyladenosine
  modified_base 18: mod_base = OTHER; note = 2'-O-methyladenosine
  modified_base 19: mod_base = gm
  modified_base 20: mod_base = cm
  modified_base 21: mod_base = OTHER; note = 2'-O-methyladenosine
  source 1..21: mol_type = other RNA
ctagagaagaaagttaaagca

SEQ ID NO: 1455 - RNA, 21 nt, synthetic construct
  modified_base 1: mod_base = OTHER; note = 2'-O-methyladenosine
  modified_base 2: mod_base = gm
  modified_base 3: mod_base = OTHER; note = 2'-O-methyladenosine
  modified_base 4: mod_base = gm
  modified_base 5: mod_base = OTHER; note = 2'-O-methyladenosine
  modified_base 6: mod_base = OTHER; note = 2'-O-methyladenosine
  modified_base 7: mod_base = gm
  modified_base 8: mod_base = OTHER; note = 2'-O-methyladenosine
  modified_base 9: mod_base = OTHER; note = 2'-fluoroadenosine
  modified_base 10: mod_base = OTHER; note = 2'-fluoroadenosine
  modified_base 11: mod_base = OTHER; note = 2'-fluoroguanosine
  modified_base 12: mod_base = um
  modified_base 13: mod_base = um
  modified_base 14: mod_base = OTHER; note = 2'-O-methyladenosine
  modified_base 15: mod_base = OTHER; note = 2'-O-methyladenosine
  modified_base 16: mod_base = OTHER; note = 2'-O-methyladenosine
  modified_base 17: mod_base = gm
  modified_base 18: mod_base = cm
  modified_base 19: mod_base = OTHER; note = 2'-O-methyladenosine
  modified_base 20: mod_base = OTHER; note = 2'-O-methyladenosine
  modified_base 21: mod_base = OTHER; note = 2'-O-methyladenosine
  source 1..21: mol_type = other RNA
agagaagaaagttaaagcaaa

SEQ ID NO: 1456 - RNA, 21 nt, synthetic construct
  modified_base 1: mod_base = OTHER; note = 2'-O-methyladenosine
  modified_base 2: mod_base = gm
  modified_base 3: mod_base = gm
  modified_base 4: mod_base = cm
  modified_base 5: mod_base = cm
  modified_base 6: mod_base = cm
  modified_base 7: mod_base = OTHER; note = 2'-O-methyladenosine
  modified_base 8: mod_base = OTHER; note = 2'-O-methyladenosine
  modified_base 9: mod_base = OTHER; note = 2'-fluorouridine
  modified_base 10: mod_base = OTHER; note = 2'-fluoroadenosine
  modified_base 11: mod_base = OTHER; note = 2'-fluorouridine
  modified_base 12: mod_base = um
  modified_base 13: mod_base = gm
  modified_base 14: mod_base = um
  modified_base 15: mod_base = OTHER; note = 2'-O-methyladenosine
  modified_base 16: mod_base = OTHER; note = 2'-O-methyladenosine
  modified_base 17: mod_base = um
  modified_base 18: mod_base = um
  modified_base 19: mod_base = um
  modified_base 20: mod_base = cm
  modified_base 21: mod_base = OTHER; note = 2'-O-methyladenosine
  source 1..21: mol_type = other RNA
aggcccaatattgtaatttca

SEQ ID NO: 1457 - RNA, 21 nt, synthetic construct
  modified_base 1: mod_base = gm
  modified_base 2: mod_base = OTHER; note = 2'-O-methyladenosine
  modified_base 3: mod_base = cm
  modified_base 4: mod_base = cm
  modified_base 5: mod_base = cm
  modified_base 6: mod_base = um
  modified_base 7: mod_base = um
  modified_base 8: mod_base = cm
  modified_base 9: mod_base = OTHER; note = 2'-fluoroadenosine
  modified_base 10: mod_base = OTHER; note = 2'-fluoroguanosine
  modified_base 11: mod_base = OTHER; note = 2'-fluoroadenosine
  modified_base 12: mod_base = OTHER; note = 2'-O-methyladenosine
  modified_base 13: mod_base = cm
  modified_base 14: mod_base = gm
  modified_base 15: mod_base = OTHER; note = 2'-O-methyladenosine
  modified_base 16: mod_base = OTHER; note = 2'-O-methyladenosine
  modified_base 17: mod_base = OTHER; note = 2'-O-methyladenosine
  modified_base 18: mod_base = gm
  modified_base 19: mod_base = um
  modified_base 20: mod_base = um
  modified_base 21: mod_base = OTHER; note = 2'-O-methyladenosine
  source 1..21: mol_type = other RNA
gacccttcagaacgaaagtta

SEQ ID NO: 1458 - RNA, 21 nt, synthetic construct
  modified_base 1: mod_base = um
  modified_base 2: mod_base = um
  modified_base 3: mod_base = cm
  modified_base 4: mod_base = OTHER; note = 2'-O-methyladenosine
  modified_base 5: mod_base = gm
  modified_base 6: mod_base = OTHER; note = 2'-O-methyladenosine
  modified_base 7: mod_base = OTHER; note = 2'-O-methyladenosine
  modified_base 8: mod_base = cm
  modified_base 9: mod_base = OTHER; note = 2'-fluoroguanosine
  modified_base 10: mod_base = OTHER; note = 2'-fluoroadenosine
  modified_base 11: mod_base = OTHER; note = 2'-fluoroadenosine
  modified_base 12: mod_base = OTHER; note = 2'-O-methyladenosine
  modified_base 13: mod_base = gm
  modified_base 14: mod_base = um
  modified_base 15: mod_base = um
  modified_base 16: mod_base = OTHER; note = 2'-O-methyladenosine
  modified_base 17: mod_base = um
  modified_base 18: mod_base = OTHER; note = 2'-O-methyladenosine
  modified_base 19: mod_base = um
  modified_base 20: mod_base = gm
  modified_base 21: mod_base = OTHER; note = 2'-O-methyladenosine
  source 1..21: mol_type = other RNA
ttcagaacgaaagttatatga

SEQ ID NO: 1459 - RNA, 21 nt, synthetic construct
  modified_base 1: mod_base = cm
  modified_base 2: mod_base = cm
  modified_base 3: mod_base = cm
  modified_base 4: mod_base = gm
  modified_base 5: mod_base = um
  modified_base 6: mod_base = um
  modified_base 7: mod_base = um
  modified_base 8: mod_base = OTHER; note = 2'-O-methyladenosine
  modified_base 9: mod_base = OTHER; note = 2'-fluoroadenosine
  modified_base 10: mod_base = OTHER; note = 2'-fluorocytidine
  modified_base 11: mod_base = OTHER; note = 2'-fluorouridine
  modified_base 12: mod_base = gm
  modified_base 13: mod_base = OTHER; note = 2'-O-methyladenosine
  modified_base 14: mod_base = um
  modified_base 15: mod_base = um
  modified_base 16: mod_base = OTHER; note = 2'-O-methyladenosine
  modified_base 17: mod_base = um
  modified_base 18: mod_base = gm
  modified_base 19: mod_base = gm
  modified_base 20: mod_base = OTHER; note = 2'-O-methyladenosine
  modified_base 21: mod_base = OTHER; note = 2'-O-methyladenosine
  source 1..21: mol_type = other RNA
cccgtttaactgattatggaa

SEQ ID NO: 1460 - RNA, 21 nt, synthetic construct
  modified_base 1: mod_base = OTHER; note = 2'-O-methyladenosine
  modified_base 2: mod_base = gm
  modified_base 3: mod_base = OTHER; note = 2'-O-methyladenosine
  modified_base 4: mod_base = cm
  modified_base 5: mod_base = OTHER; note = 2'-O-methyladenosine
  modified_base 6: mod_base = gm
  modified_base 7: mod_base = cm
  modified_base 8: mod_base = OTHER; note = 2'-O-methyladenosine
  modified_base 9: mod_base = OTHER; note = 2'-fluorouridine
  modified_base 10: mod_base = OTHER; note = 2'-fluorouridine
  modified_base 11: mod_base = OTHER; note = 2'-fluoroguanosine
  modified_base 12: mod_base = gm
  modified_base 13: mod_base = OTHER; note = 2'-O-methyladenosine
  modified_base 14: mod_base = um
  modified_base 15: mod_base = um
  modified_base 16: mod_base = um
  modified_base 17: mod_base = cm
  modified_base 18: mod_base = cm
  modified_base 19: mod_base = um
  modified_base 20: mod_base = OTHER; note = 2'-O-methyladenosine
  modified_base 21: mod_base = OTHER; note = 2'-O-methyladenosine
  source 1..21: mol_type = other RNA
agacagcattggatttcctaa

SEQ ID NO: 1461 - RNA, 21 nt, synthetic construct
  modified_base 1: mod_base = um
  modified_base 2: mod_base = um
  modified_base 3: mod_base = OTHER; note = 2'-O-methyladenosine
  modified_base 4: mod_base = um
  modified_base 5: mod_base = um
  modified_base 6: mod_base = gm
  modified_base 7: mod_base = cm
  modified_base 8: mod_base = cm
  modified_base 9: mod_base = OTHER; note = 2'-fluoroadenosine
  modified_base 10: mod_base = OTHER; note = 2'-fluorouridine
  modified_base 11: mod_base = OTHER; note = 2'-fluorouridine
  modified_base 12: mod_base = um
  modified_base 13: mod_base = um
  modified_base 14: mod_base = gm
  modified_base 15: mod_base = um
  modified_base 16: mod_base = cm
  modified_base 17: mod_base = cm
  modified_base 18: mod_base = um
  modified_base 19: mod_base = um
  modified_base 20: mod_base = um
  modified_base 21: mod_base = OTHER; note = 2'-O-methyladenosine
  source 1..21: mol_type = other RNA
ttattgccattttgtccttta

SEQ ID NO: 1462 - RNA, 21 nt, synthetic construct
  modified_base 1: mod_base = um
  modified_base 2: mod_base = gm
  modified_base 3: mod_base = cm
  modified_base 4: mod_base = cm
  modified_base 5: mod_base = OTHER; note = 2'-O-methyladenosine
  modified_base 6: mod_base = um
  modified_base 7: mod_base = um
  modified_base 8: mod_base = um
  modified_base 9: mod_base = OTHER; note = 2'-fluorouridine
  modified_base 10: mod_base = OTHER; note = 2'-fluoroguanosine
  modified_base 11: mod_base = OTHER; note = 2'-fluorouridine
  modified_base 12: mod_base = cm
  modified_base 13: mod_base = cm
  modified_base 14: mod_base = um
  modified_base 15: mod_base = um
  modified_base 16: mod_base = um
  modified_base 17: mod_base = gm
  modified_base 18: mod_base = OTHER; note = 2'-O-methyladenosine
  modified_base 19: mod_base = um
  modified_base 20: mod_base = um
  modified_base 21: mod_base = OTHER; note = 2'-O-methyladenosine
  source 1..21: mol_type = other RNA
tgccattttgtcctttgatta

SEQ ID NO: 1463 - RNA, 21 nt, synthetic construct
  modified_base 1: mod_base = cm
  modified_base 2: mod_base = cm
  modified_base 3: mod_base = OTHER; note = 2'-O-methyladenosine
  modified_base 4: mod_base = cm
  modified_base 5: mod_base = um
  modified_base 6: mod_base = gm
  modified_base 7: mod_base = OTHER; note = 2'-O-methyladenosine
  modified_base 8: mod_base = OTHER; note = 2'-O-methyladenosine
  modified_base 9: mod_base = OTHER; note = 2'-fluoroadenosine
  modified_base 10: mod_base = OTHER; note = 2'-fluoroadenosine
  modified_base 11: mod_base = OTHER; note = 2'-fluorocytidine
  modified_base 12: mod_base = cm
  modified_base 13: mod_base = um
  modified_base 14: mod_base = um
  modified_base 15: mod_base = um
  modified_base 16: mod_base = OTHER; note = 2'-O-methyladenosine
  modified_base 17: mod_base = OTHER; note = 2'-O-methyladenosine
  modified_base 18: mod_base = OTHER; note = 2'-O-methyladenosine
  modified_base 19: mod_base = gm
  modified_base 20: mod_base = gm
  modified_base 21: mod_base = OTHER; note = 2'-O-methyladenosine
  source 1..21: mol_type = other RNA
ccactgaaaacctttaaagga

SEQ ID NO: 1464 - RNA, 21 nt, synthetic construct
  modified_base 1: mod_base = gm
  modified_base 2: mod_base = OTHER; note = 2'-O-methyladenosine
  modified_base 3: mod_base = um
  modified_base 4: mod_base = um
  modified_base 5: mod_base = OTHER; note = 2'-O-methyladenosine
  modified_base 6: mod_base = um
  modified_base 7: mod_base = gm
  modified_base 8: mod_base = gm
  modified_base 9: mod_base = OTHER; note = 2'-fluoroadenosine
  modified_base 10: mod_base = OTHER; note = 2'-fluoroadenosine
  modified_base 11: mod_base = OTHER; note = 2'-fluorouridine
  modified_base 12: mod_base = OTHER; note = 2'-O-methyladenosine
  modified_base 13: mod_base = gm
  modified_base 14: mod_base = um
  modified_base 15: mod_base = um
  modified_base 16: mod_base = cm
  modified_base 17: mod_base = um
  modified_base 18: mod_base = um
  modified_base 19: mod_base = um
  modified_base 20: mod_base = cm
  modified_base 21: mod_base = OTHER; note = 2'-O-methyladenosine
  source 1..21: mol_type = other RNA
gattatggaatagttctttca

SEQ ID NO: 1465 - RNA, 21 nt, synthetic construct
  modified_base 1: mod_base = gm
  modified_base 2: mod_base = um
  modified_base 3: mod_base = um
  modified_base 4: mod_base = cm
  modified_base 5: mod_base = um
  modified_base 6: mod_base = cm
  modified_base 7: mod_base = OTHER; note = 2'-O-methyladenosine
  modified_base 8: mod_base = OTHER; note = 2'-O-methyladenosine
  modified_base 9: mod_base = OTHER; note = 2'-fluoroadenosine
  modified_base 10: mod_base = OTHER; note = 2'-fluoroadenosine
  modified_base 11: mod_base = OTHER; note = 2'-fluoroadenosine
  modified_base 12: mod_base = um
  modified_base 13: mod_base = gm
  modified_base 14: mod_base = OTHER; note = 2'-O-methyladenosine
  modified_base 15: mod_base = cm
  modified_base 16: mod_base = OTHER; note = 2'-O-methyladenosine
  modified_base 17: mod_base = OTHER; note = 2'-O-methyladenosine
  modified_base 18: mod_base = cm
  modified_base 19: mod_base = OTHER; note = 2'-O-methyladenosine
  modified_base 20: mod_base = cm
  modified_base 21: mod_base = OTHER; note = 2'-O-methyladenosine
  source 1..21: mol_type = other RNA
gttctcaaaaatgacaacaca

SEQ ID NO: 1466 - RNA, 21 nt, synthetic construct
  modified_base 1: mod_base = OTHER; note = 2'-O-methyladenosine
  modified_base 2: mod_base = gm
  modified_base 3: mod_base = gm
  modified_base 4: mod_base = um
  modified_base 5: mod_base = um
  modified_base 6: mod_base = um
  modified_base 7: mod_base = um
  modified_base 8: mod_base = gm
  modified_base 9: mod_base = OTHER; note = 2'-fluoroguanosine
  modified_base 10: mod_base = OTHER; note = 2'-fluorocytidine
  modified_base 11: mod_base = OTHER; note = 2'-fluorouridine
  modified_base 12: mod_base = um
  modified_base 13: mod_base = gm
  modified_base 14: mod_base = um
  modified_base 15: mod_base = gm
  modified_base 16: mod_base = OTHER; note = 2'-O-methyladenosine
  modified_base 17: mod_base = um
  modified_base 18: mod_base = cm
  modified_base 19: mod_base = OTHER; note = 2'-O-methyladenosine
  modified_base 20: mod_base = OTHER; note = 2'-O-methyladenosine
  modified_base 21: mod_base = OTHER; note = 2'-O-methyladenosine
  source 1..21: mol_type = other RNA
aggttttggcttgtgatcaaa

SEQ ID NO: 1467 - RNA, 21 nt, synthetic construct
  modified_base 1: mod_base = gm
  modified_base 2: mod_base = gm
  modified_base 3: mod_base = um
  modified_base 4: mod_base = um
  modified_base 5: mod_base = um
  modified_base 6: mod_base = um
  modified_base 7: mod_base = gm
  modified_base 8: mod_base = gm
  modified_base 9: mod_base = OTHER; note = 2'-fluorocytidine
  modified_base 10: mod_base = OTHER; note = 2'-fluorouridine
  modified_base 11: mod_base = OTHER; note = 2'-fluorouridine
  modified_base 12: mod_base = gm
  modified_base 13: mod_base = um
  modified_base 14: mod_base = gm
  modified_base 15: mod_base = OTHER; note = 2'-O-methyladenosine
  modified_base 16: mod_base = um
  modified_base 17: mod_base = cm
  modified_base 18: mod_base = OTHER; note = 2'-O-methyladenosine
  modified_base 19: mod_base = OTHER; note = 2'-O-methyladenosine
  modified_base 20: mod_base = cm
  modified_base 21: mod_base = OTHER; note = 2'-O-methyladenosine
  source 1..21: mol_type = other RNA
ggttttggcttgtgatcaaca

SEQ ID NO: 1468 - RNA, 21 nt, synthetic construct
  modified_base 1: mod_base = gm
  modified_base 2: mod_base = OTHER; note = 2'-O-methyladenosine
  modified_base 3: mod_base = um
  modified_base 4: mod_base = um
  modified_base 5: mod_base = OTHER; note = 2'-O-methyladenosine
  modified_base 6: mod_base = um
  modified_base 7: mod_base = gm
  modified_base 8: mod_base = gm
  modified_base 9: mod_base = OTHER; note = 2'-fluoroadenosine
  modified_base 10: mod_base = OTHER; note = 2'-O-methyladenosine
  modified_base 11: mod_base = OTHER; note = 2'-fluorouridine
  modified_base 12: mod_base = OTHER; note = 2'-O-methyladenosine
  modified_base 13: mod_base = OTHER; note = 2'-fluoroguanosine
  modified_base 14: mod_base = um
  modified_base 15: mod_base = um
  modified_base 16: mod_base = cm
  modified_base 17: mod_base = um
  modified_base 18: mod_base = um
  modified_base 19: mod_base = um
  modified_base 20: mod_base = cm
  modified_base 21: mod_base = um
  source 1..21: mol_type = other RNA
gattatggaatagttctttct

SEQ ID NO: 1469 - RNA, 21 nt, synthetic construct
  modified_base 1: mod_base = gm
  modified_base 2: mod_base = OTHER; note = 2'-O-methyladenosine
  modified_base 3: mod_base = um
  modified_base 4: mod_base = um
  modified_base 5: mod_base = OTHER; note = 2'-O-methyladenosine
  modified_base 6: mod_base = um
  modified_base 7: mod_base = gm
  modified_base 8: mod_base = gm
  modified_base 9: mod_base = OTHER; note = 2'-fluoroadenosine
  modified_base 10: mod_base = OTHER; note = 2'-O-methyladenosine
  modified_base 11: mod_base = OTHER; note = 2'-fluorouridine
  modified_base 12: mod_base = OTHER; note = 2'-O-methyladenosine
  modified_base 13: mod_base = gm
  modified_base 14: mod_base = um
  modified_base 15: mod_base = um
  modified_base 16: mod_base = cm
  modified_base 17: mod_base = um
  modified_base 18: mod_base = um
  modified_base 19: mod_base = um
  modified_base 20: mod_base = cm
  modified_base 21: mod_base = um
  source 1..21: mol_type = other RNA
gattatggaatagttctttct

SEQ ID NO: 1470 - RNA, 21 nt, synthetic construct
  modified_base 1: mod_base = OTHER; note = 2'-O-methyladenosine
  modified_base 2: mod_base = um
  modified_base 3: mod_base = um
  modified_base 4: mod_base = OTHER; note = 2'-O-methyladenosine
  modified_base 5: mod_base = um
  modified_base 6: mod_base = gm
  modified_base 7: mod_base = gm
  modified_base 8: mod_base = OTHER; note = 2'-O-methyladenosine
  modified_base 9: mod_base = OTHER; note = 2'-fluoroadenosine
  modified_base 10: mod_base = OTHER; note = 2'-fluorouridine
  modified_base 11: mod_base = OTHER; note = 2'-fluoroadenosine
  modified_base 12: mod_base = gm
  modified_base 13: mod_base = um
  modified_base 14: mod_base = um
  modified_base 15: mod_base = cm
  modified_base 16: mod_base = um
  modified_base 17: mod_base = um
  modified_base 18: mod_base = um
  modified_base 19: mod_base = cm
  modified_base 20: mod_base = um
  modified_base 21: mod_base = OTHER; note = 2'-O-methyladenosine
  source 1..21: mol_type = other RNA
attatggaatagttctttcta

SEQ ID NO: 1471 - RNA, 21 nt, synthetic construct
  modified_base 1: mod_base = OTHER; note = 2'-O-methyladenosine
  modified_base 2: mod_base = cm
  modified_base 3: mod_base = um
  modified_base 4: mod_base = OTHER; note = 2'-O-methyladenosine
  modified_base 5: mod_base = um
  modified_base 6: mod_base = gm
  modified_base 7: mod_base = gm
  modified_base 8: mod_base = OTHER; note = 2'-O-methyladenosine
  modified_base 9: mod_base = OTHER; note = 2'-fluoroadenosine
  modified_base 10: mod_base = OTHER; note = 2'-fluorouridine
  modified_base 11: mod_base = OTHER; note = 2'-fluoroadenosine
  modified_base 12: mod_base = gm
  modified_base 13: mod_base = um
  modified_base 14: mod_base = um
  modified_base 15: mod_base = cm
  modified_base 16: mod_base = um
  modified_base 17: mod_base = um
  modified_base 18: mod_base = um
  modified_base 19: mod_base = cm
  modified_base 20: mod_base = um
  modified_base 21: mod_base = OTHER; note = 2'-O-methyladenosine
  source 1..21: mol_type = other RNA
actatggaatagttctttcta

SEQ ID NO: 1472 - RNA, 21 nt, synthetic construct
  modified_base 1: mod_base = gm
  modified_base 2: mod_base = cm
  modified_base 3: mod_base = um
  modified_base 4: mod_base = OTHER; note = 2'-O-methyladenosine
  modified_base 5: mod_base = um
  modified_base 6: mod_base = gm
  modified_base 7: mod_base = gm
  modified_base 8: mod_base = OTHER; note = 2'-O-methyladenosine
  modified_base 9: mod_base = OTHER; note = 2'-fluoroadenosine
  modified_base 10: mod_base = OTHER; note = 2'-fluorouridine
  modified_base 11: mod_base = OTHER; note = 2'-fluoroadenosine
  modified_base 12: mod_base = gm
  modified_base 13: mod_base = um
  modified_base 14: mod_base = um
  modified_base 15: mod_base = cm
  modified_base 16: mod_base = um
  modified_base 17: mod_base = um
  modified_base 18: mod_base = um
  modified_base 19: mod_base = cm
  modified_base 20: mod_base = um
  modified_base 21: mod_base = OTHER; note = 2'-O-methyladenosine
  source 1..21: mol_type = other RNA
gctatggaatagttctttcta

SEQ ID NO: 1473 - RNA, 21 nt, synthetic construct
  modified_base 1: mod_base = um
  modified_base 2: mod_base = gm
  modified_base 3: mod_base = OTHER; note = 2'-O-methyladenosine
  modified_base 4: mod_base = cm
  modified_base 5: mod_base = um
  modified_base 6: mod_base = OTHER; note = 2'-O-methyladenosine
  modified_base 7: mod_base = gm
  modified_base 8: mod_base = um
  modified_base 9: mod_base = OTHER; note = 2'-fluorouridine
  modified_base 10: mod_base = OTHER; note = 2'-fluorouridine
  modified_base 11: mod_base = OTHER; note = 2'-fluorocytidine
  modified_base 12: mod_base = OTHER; note = 2'-O-methyladenosine
  modified_base 13: mod_base = gm
  modified_base 14: mod_base = OTHER; note = 2'-O-methyladenosine
  modified_base 15: mod_base = um
  modified_base 16: mod_base = cm
  modified_base 17: mod_base = um
  modified_base 18: mod_base = um
  modified_base 19: mod_base = OTHER; note = 2'-O-methyladenosine
  modified_base 20: mod_base = cm
  modified_base 21: mod_base = um
  source 1..21: mol_type = other RNA
tgactagtttcagatcttact

SEQ ID NO: 1474 - RNA, 21 nt, synthetic construct
  modified_base 1: mod_base = um
  modified_base 2: mod_base = OTHER; note = 2'-O-methyladenosine
  modified_base 3: mod_base = gm
  modified_base 4: mod_base = um
  modified_base 5: mod_base = um
  modified_base 6: mod_base = um
  modified_base 7: mod_base = cm
  modified_base 8: mod_base = OTHER; note = 2'-O-methyladenosine
  modified_base 9: mod_base = OTHER; note = 2'-fluoroguanosine
  modified_base 10: mod_base = OTHER; note = 2'-fluoroadenosine
  modified_base 11: mod_base = OTHER; note = 2'-fluorouridine
  modified_base 12: mod_base = cm
  modified_base 13: mod_base = um
  modified_base 14: mod_base = um
  modified_base 15: mod_base = OTHER; note = 2'-O-methyladenosine
  modified_base 16: mod_base = cm
  modified_base 17: mod_base = um
  modified_base 18: mod_base = OTHER; note = 2'-O-methyladenosine
  modified_base 19: mod_base = OTHER; note = 2'-O-methyladenosine
  modified_base 20: mod_base = cm
  modified_base 21: mod_base = um
  source 1..21: mol_type = other RNA
tagtttcagatcttactaact

SEQ ID NO: 1475 - RNA, 21 nt, synthetic construct
  modified_base 1: mod_base = gm
  modified_base 2: mod_base = um
  modified_base 3: mod_base = um
  modified_base 4: mod_base = um
  modified_base 5: mod_base = cm
  modified_base 6: mod_base = OTHER; note = 2'-O-methyladenosine
  modified_base 7: mod_base = gm
  modified_base 8: mod_base = OTHER; note = 2'-O-methyladenosine
  modified_base 9: mod_base = OTHER; note = 2'-fluorouridine
  modified_base 10: mod_base = OTHER; note = 2'-fluorocytidine
  modified_base 11: mod_base = OTHER; note = 2'-fluorouridine
  modified_base 12: mod_base = um
  modified_base 13: mod_base = OTHER; note = 2'-O-methyladenosine
  modified_base 14: mod_base = cm
  modified_base 15: mod_base = um
  modified_base 16: mod_base = OTHER; note = 2'-O-methyladenosine
  modified_base 17: mod_base = OTHER; note = 2'-O-methyladenosine
  modified_base 18: mod_base = cm
  modified_base 19: mod_base = um
  modified_base 20: mod_base = um
  modified_base 21: mod_base = OTHER; note = 2'-O-methyladenosine
  source 1..21: mol_type = other RNA
gtttcagatcttactaactta

SEQ ID NO: 1476 - RNA, 21 nt, synthetic construct
  modified_base 1: mod_base = gm
  modified_base 2: mod_base = um
  modified_base 3: mod_base = gm
  modified_base 4: mod_base = cm
  modified_base 5: mod_base = OTHER; note = 2'-O-methyladenosine
  modified_base 6: mod_base = um
  modified_base 7: mod_base = gm
  modified_base 8: mod_base = um
  modified_base 9: mod_base = OTHER; note = 2'-fluoroguanosine
  modified_base 10: mod_base = OTHER; note = 2'-fluorocytidine
  modified_base 11: mod_base = OTHER; note = 2'-fluorouridine
  modified_base 12: mod_base = um
  modified_base 13: mod_base = gm
  modified_base 14: mod_base = um
  modified_base 15: mod_base = um
  modified_base 16: mod_base = um
  modified_base 17: mod_base = um
  modified_base 18: mod_base = OTHER; note = 2'-O-methyladenosine
  modified_base 19: mod_base = um
  modified_base 20: mod_base = gm
  modified_base 21: mod_base = OTHER; note = 2'-O-methyladenosine
  source 1..21: mol_type = other RNA
gtgcatgtgcttgttttatga

SEQ ID NO: 1477 - RNA, 21 nt, synthetic construct
  modified_base 1: mod_base = gm
  modified_base 2: mod_base = OTHER; note = 2'-O-methyladenosine
  modified_base 3: mod_base = gm
  modified_base 4: mod_base = OTHER; note = 2'-O-methyladenosine
  modified_base 5: mod_base = cm
  modified_base 6: mod_base = OTHER; note = 2'-O-methyladenosine
  modified_base 7: mod_base = OTHER; note = 2'-O-methyladenosine
  modified_base 8: mod_base = OTHER; note = 2'-O-methyladenosine
  modified_base 9: mod_base = OTHER; note = 2'-fluoroguanosine
  modified_base 10: mod_base = OTHER; note = 2'-fluorocytidine
  modified_base 11: mod_base = OTHER; note = 2'-fluoroguanosine
  modified_base 12: mod_base = OTHER; note = 2'-O-methyladenosine
  modified_base 13: mod_base = OTHER; note = 2'-O-methyladenosine
  modified_base 14: mod_base = gm
  modified_base 15: mod_base = um
  modified_base 16: mod_base = gm
  modified_base 17: mod_base = um
  modified_base 18: mod_base = um
  modified_base 19: mod_base = cm
  modified_base 20: mod_base = OTHER; note = 2'-O-methyladenosine
  modified_base 21: mod_base = OTHER; note = 2'-O-methyladenosine
  source 1..21: mol_type = other RNA
gagacaaagcgaagtgttcaa

SEQ ID NO: 1478 - RNA, 21 nt, synthetic construct
  modified_base 1: mod_base = um
  modified_base 2: mod_base = um
  modified_base 3: mod_base = cm
  modified_base 4: mod_base = cm
  modified_base 5: mod_base = OTHER; note = 2'-O-methyladenosine
  modified_base 6: mod_base = gm
  modified_base 7: mod_base = um
  modified_base 8: mod_base = gm
  modified_base 9: mod_base = OTHER; note = 2'-fluoroadenosine
  modified_base 10: mod_base = OTHER; note = 2'-fluorocytidine
  modified_base 11: mod_base = OTHER; note = 2'-fluorocytidine
  modified_base 12: mod_base = um
  modified_base 13: mod_base = cm
  modified_base 14: mod_base = um
  modified_base 15: mod_base = OTHER; note = 2'-O-methyladenosine
  modified_base 16: mod_base = gm
  modified_base 17: mod_base = OTHER; note = 2'-O-methyladenosine
  modified_base 18: mod_base = OTHER; note = 2'-O-methyladenosine
  modified_base 19: mod_base = um
  modified_base 20: mod_base = cm
  modified_base 21: mod_base = um
  source 1..21: mol_type = other RNA
ttccagtgacctctagaatct

SEQ ID NO: 1479 - RNA, 21 nt, synthetic construct
  modified_base 1: mod_base = gm
  modified_base 2: mod_base = OTHER; note = 2'-O-methyladenosine
  modified_base 3: mod_base = gm
  modified_base 4: mod_base = cm
  modified_base 5: mod_base = OTHER; note = 2'-O-methyladenosine
  modified_base 6: mod_base = um
  modified_base 7: mod_base = um
  modified_base 8: mod_base = um
  modified_base 9: mod_base = OTHER; note = 2'-fluoroguanosine
  modified_base 10: mod_base = OTHER; note = 2'-fluorocytidine
  modified_base 11: mod_base = OTHER; note = 2'-fluoroadenosine
  modified_base 12: mod_base = cm
  modified_base 13: mod_base = OTHER; note = 2'-O-methyladenosine
  modified_base 14: mod_base = cm
  modified_base 15: mod_base = um
  modified_base 16: mod_base = OTHER; note = 2'-O-methyladenosine
  modified_base 17: mod_base = um
  modified_base 18: mod_base = um
  modified_base 19: mod_base = cm
  modified_base 20: mod_base = cm
  modified_base 21: mod_base = OTHER; note = 2'-O-methyladenosine
  source 1..21: mol_type = other RNA
gagcatttgcacactattcca

SEQ ID NO: 1480 - RNA, 21 nt, synthetic construct
  modified_base 1: mod_base = OTHER; note = 2'-O-methyladenosine
  modified_base 2: mod_base = um
  modified_base 3: mod_base = gm
  modified_base 4: mod_base = OTHER; note = 2'-O-methyladenosine
  modified_base 5: mod_base = cm
  modified_base 6: mod_base = OTHER; note = 2'-O-methyladenosine
  modified_base 7: mod_base = gm
  modified_base 8: mod_base = OTHER; note = 2'-O-methyladenosine
  modified_base 9: mod_base = OTHER; note = 2'-fluorouridine
  modified_base 10: mod_base = OTHER; note = 2'-fluoroguanosine
  modified_base 11: mod_base = OTHER; note = 2'-fluorouridine
  modified_base 12: mod_base = um
  modified_base 13: mod_base = um
  modified_base 14: mod_base = gm
  modified_base 15: mod_base = OTHER; note = 2'-O-methyladenosine
  modified_base 16: mod_base = gm
  modified_base 17: mod_base = OTHER; note = 2'-O-methyladenosine
  modified_base 18: mod_base = um
  modified_base 19: mod_base = cm
  modified_base 20: mod_base = OTHER; note = 2'-O-methyladenosine
  modified_base 21: mod_base = OTHER; note = 2'-O-methyladenosine
  source 1..21: mol_type = other RNA
atgacagatgtttgagatcaa

SEQ ID NO: 1481 - RNA, 21 nt, synthetic construct
  modified_base 1: mod_base = um
  modified_base 2: mod_base = cm
  modified_base 3: mod_base = um
  modified_base 4: mod_base = gm
  modified_base 5: mod_base = um
  modified_base 6: mod_base = gm
  modified_base 7: mod_base = um
  modified_base 8: mod_base = gm
  modified_base 9: mod_base = OTHER; note = 2'-fluoroguanosine
  modified_base 10: mod_base = OTHER; note = 2'-fluorocytidine
  modified_base 11: mod_base = OTHER; note = 2'-fluoroadenosine
  modified_base 12: mod_base = OTHER; note = 2'-O-methyladenosine
  modified_base 13: mod_base = cm
  modified_base 14: mod_base = um
  modified_base 15: mod_base = um
  modified_base 16: mod_base = OTHER; note = 2'-O-methyladenosine
  modified_base 17: mod_base = um
  modified_base 18: mod_base = gm
  modified_base 19: mod_base = cm
  modified_base 20: mod_base = um
  modified_base 21: mod_base = OTHER; note = 2'-O-methyladenosine
  source 1..21: mol_type = other RNA
tctgtgtggcaacttatgcta

SEQ ID NO: 1482 - RNA, 21 nt, synthetic construct
  modified_base 1: mod_base = cm
  modified_base 2: mod_base = OTHER; note = 2'-O-methyladenosine
  modified_base 3: mod_base = gm
  modified_base 4: mod_base = OTHER; note = 2'-O-methyladenosine
  modified_base 5: mod_base = cm
  modified_base 6: mod_base = cm
  modified_base 7: mod_base = OTHER; note = 2'-O-methyladenosine
  modified_base 8: mod_base = gm
  modified_base 9: mod_base = OTHER; note = 2'-fluoroadenosine
  modified_base 10: mod_base = OTHER; note = 2'-fluorocytidine
  modified_base 11: mod_base = OTHER; note = 2'-fluorocytidine
  modified_base 12: mod_base = um
  modified_base 13: mod_base = um
  modified_base 14: mod_base = gm
  modified_base 15: mod_base = OTHER; note = 2'-O-methyladenosine
  modified_base 16: mod_base = um
  modified_base 17: mod_base = um
  modified_base 18: mod_base = gm
  modified_base 19: mod_base = um
  modified_base 20: mod_base = gm
  modified_base 21: mod_base = OTHER; note = 2'-O-methyladenosine
  source 1..21: mol_type = other RNA
cagaccagaccttgattgtga

SEQ ID NO: 1483 - RNA, 21 nt, synthetic construct
  modified_base 1: mod_base = OTHER; note = 2'-O-methyladenosine
  modified_base 2: mod_base = gm
  modified_base 3: mod_base = gm
  modified_base 4: mod_base = gm
  modified_base 5: mod_base = OTHER; note = 2'-O-methyladenosine
  modified_base 6: mod_base = gm
  modified_base 7: mod_base = OTHER; note = 2'-O-methyladenosine
  modified_base 8: mod_base = OTHER; note = 2'-O-methyladenosine
  modified_base 9: mod_base = OTHER; note = 2'-fluoroguanosine
  modified_base 10: mod_base = OTHER; note = 2'-fluorocytidine
  modified_base 11: mod_base = OTHER; note = 2'-fluoroadenosine
  modified_base 12: mod_base = cm
  modified_base 13: mod_base = um
  modified_base 14: mod_base = cm
  modified_base 15: mod_base = um
  modified_base 16: mod_base = cm
  modified_base 17: mod_base = um
  modified_base 18: mod_base = um
  modified_base 19: mod_base = um
  modified_base 20: mod_base = cm
  modified_base 21: mod_base = um
  source 1..21: mol_type = other RNA
agggagaagcactctctttct

SEQ ID NO: 1484 - RNA, 21 nt, synthetic construct
  modified_base 1: mod_base = gm
  modified_base 2: mod_base = OTHER; note = 2'-O-methyladenosine
  modified_base 3: mod_base = OTHER; note = 2'-O-methyladenosine
  modified_base 4: mod_base = OTHER; note = 2'-O-methyladenosine
  modified_base 5: mod_base = cm
  modified_base 6: mod_base = cm
  modified_base 7: mod_base = OTHER; note = 2'-O-methyladenosine
  modified_base 8: mod_base = OTHER; note = 2'-O-methyladenosine
  modified_base 9: mod_base = OTHER; note = 2'-fluoroadenosine
  modified_base 10: mod_base = OTHER; note = 2'-fluorocytidine
  modified_base 11: mod_base = OTHER; note = 2'-fluorouridine
  modified_base 12: mod_base = cm
  modified_base 13: mod_base = um
  modified_base 14: mod_base = cm
  modified_base 15: mod_base = um
  modified_base 16: mod_base = cm
  modified_base 17: mod_base = um
  modified_base 18: mod_base = OTHER; note = 2'-O-methyladenosine
  modified_base 19: mod_base = OTHER; note = 2'-O-methyladenosine
  modified_base 20: mod_base = cm
  modified_base 21: mod_base = OTHER; note = 2'-O-methyladenosine
  source 1..21: mol_type = other RNA
gaaaccaaactctctctaaca

SEQ ID NO: 1485 - RNA, 21 nt, synthetic construct
  modified_base 1: mod_base = OTHER; note = 2'-O-methyladenosine
  modified_base 2: mod_base = cm
  modified_base 3: mod_base = cm
  modified_base 4: mod_base = OTHER; note = 2'-O-methyladenosine
  modified_base 5: mod_base = OTHER; note = 2'-O-methyladenosine
  modified_base 6: mod_base = OTHER; note = 2'-O-methyladenosine
  modified_base 7: mod_base = cm
  modified_base 8: mod_base = um
  modified_base 9: mod_base = OTHER; note = 2'-fluorocytidine
  modified_base 10: mod_base = OTHER; note = 2'-fluorouridine
  modified_base 11: mod_base = OTHER; note = 2'-fluorocytidine
  modified_base 12: mod_base = um
  modified_base 13: mod_base = cm
  modified_base 14: mod_base = um
  modified_base 15: mod_base = OTHER; note = 2'-O-methyladenosine
  modified_base 16: mod_base = OTHER; note = 2'-O-methyladenosine
  modified_base 17: mod_base = cm
  modified_base 18: mod_base = cm
  modified_base 19: mod_base = um
  modified_base 20: mod_base = um
  modified_base 21: mod_base = OTHER; note = 2'-O-methyladenosine
  source 1..21: mol_type = other RNA
accaaactctctctaacctta

SEQ ID NO: 1486 - RNA, 21 nt, synthetic construct
  modified_base 1: mod_base = gm
  modified_base 2: mod_base = um
  modified_base 3: mod_base = gm
  modified_base 4: mod_base = OTHER; note = 2'-O-methyladenosine
  modified_base 5: mod_base = um
  modified_base 6: mod_base = gm
  modified_base 7: mod_base = um
  modified_base 8: mod_base = OTHER; note = 2'-O-methyladenosine
  modified_base 9: mod_base = OTHER; note = 2'-fluoroadenosine
  modified_base 10: mod_base = OTHER; note = 2'-fluoroguanosine
  modified_base 11: mod_base = OTHER; note = 2'-fluorouridine
  modified_base 12: mod_base = um
  modified_base 13: mod_base = OTHER; note = 2'-O-methyladenosine
  modified_base 14: mod_base = cm
  modified_base 15: mod_base = OTHER; note = 2'-O-methyladenosine
  modified_base 16: mod_base = OTHER; note = 2'-O-methyladenosine
  modified_base 17: mod_base = OTHER; note = 2'-O-methyladenosine
  modified_base 18: mod_base = OTHER; note = 2'-O-methyladenosine
  modified_base 19: mod_base = cm
  modified_base 20: mod_base = cm
  modified_base 21: mod_base = OTHER; note = 2'-O-methyladenosine
  source 1..21: mol_type = other RNA
gtgatgtaagttacaaaacca

SEQ ID NO: 1487 - RNA, 21 nt, synthetic construct
  modified_base 1: mod_base = OTHER; note = 2'-O-methyladenosine
  modified_base 2: mod_base = OTHER; note = 2'-O-methyladenosine
  modified_base 3: mod_base = cm
  modified_base 4: mod_base = cm
  modified_base 5: mod_base = OTHER; note = 2'-O-methyladenosine
  modified_base 6: mod_base = cm
  modified_base 7: mod_base = cm
  modified_base 8: mod_base = um
  modified_base 9: mod_base = OTHER; note = 2'-fluoroguanosine
  modified_base 10: mod_base = OTHER; note = 2'-fluorouridine
  modified_base 11: mod_base = OTHER; note = 2'-fluoroguanosine
  modified_base 12: mod_base = OTHER; note = 2'-O-methyladenosine
  modified_base 13: mod_base = um
  modified_base 14: mod_base = gm
  modified_base 15: mod_base = OTHER; note = 2'-O-methyladenosine
  modified_base 16: mod_base = OTHER; note = 2'-O-methyladenosine
  modified_base 17: mod_base = OTHER; note = 2'-O-methyladenosine
  modified_base 18: mod_base = gm
  modified_base 19: mod_base = um
  modified_base 20: mod_base = gm
  modified_base 21: mod_base = OTHER; note = 2'-O-methyladenosine
  source 1..21: mol_type = other RNA
aaccacctgtgatgaaagtga

SEQ ID NO: 1488 - RNA, 21 nt, synthetic construct
  modified_base 1: mod_base = um
  modified_base 2: mod_base = gm
  modified_base 3: mod_base = OTHER; note = 2'-O-methyladenosine
  modified_base 4: mod_base = cm
  modified_base 5: mod_base = um
  modified_base 6: mod_base = gm
  modified_base 7: mod_base = gm
  modified_base 8: mod_base = um
  modified_base 9: mod_base = OTHER; note = 2'-fluoroguanosine
  modified_base 10: mod_base = OTHER; note = 2'-fluorocytidine
  modified_base 11: mod_base = OTHER; note = 2'-fluoroadenosine
  modified_base 12: mod_base = um
  modified_base 13: mod_base = um
  modified_base 14: mod_base = um
  modified_base 15: mod_base = OTHER; note = 2'-O-methyladenosine
  modified_base 16: mod_base = um
  modified_base 17: mod_base = OTHER; note = 2'-O-methyladenosine
  modified_base 18: mod_base = OTHER; note = 2'-O-methyladenosine
  modified_base 19: mod_base = um
  modified_base 20: mod_base = cm
  modified_base 21: mod_base = OTHER; note = 2'-O-methyladenosine
  source 1..21: mol_type = other RNA
tgactggtgcatttataatca

SEQ ID NO: 1489 - RNA, 21 nt, synthetic construct
  modified_base 1: mod_base = OTHER; note = 2'-O-methyladenosine
  modified_base 2: mod_base = cm
  modified_base 3: mod_base = OTHER; note = 2'-O-methyladenosine
  modified_base 4: mod_base = gm
  modified_base 5: mod_base = cm
  modified_base 6: mod_base = um
  modified_base 7: mod_base = cm
  modified_base 8: mod_base = um
  modified_base 9: mod_base = OTHER; note = 2'-fluoroguanosine
  modified_base 10: mod_base = OTHER; note = 2'-fluoroadenosine
  modified_base 11: mod_base = OTHER; note = 2'-fluorocytidine
  modified_base 12: mod_base = um
  modified_base 13: mod_base = OTHER; note = 2'-O-methyladenosine
  modified_base 14: mod_base = um
  modified_base 15: mod_base = OTHER; note = 2'-O-methyladenosine
  modified_base 16: mod_base = OTHER; note = 2'-O-methyladenosine
  modified_base 17: mod_base = cm
  modified_base 18: mod_base = um
  modified_base 19: mod_base = cm
  modified_base 20: mod_base = um
  modified_base 21: mod_base = OTHER; note = 2'-O-methyladenosine
  source 1..21: mol_type = other RNA
acagctctgactataactcta

SEQ ID NO: 1490 - RNA, 21 nt, synthetic construct
  modified_base 1: mod_base = um
  modified_base 2: mod_base = OTHER; note = 2'-O-methyladenosine
  modified_base 3: mod_base = cm
  modified_base 4: mod_base = cm
  modified_base 5: mod_base = um
  modified_base 6: mod_base = um
  modified_base 7: mod_base = um
  modified_base 8: mod_base = OTHER; note = 2'-O-methyladenosine
  modified_base 9: mod_base = OTHER; note = 2'-fluorocytidine
  modified_base 10: mod_base = OTHER; note = 2'-fluoroadenosine
  modified_base 11: mod_base = OTHER; note = 2'-fluoroguanosine
  modified_base 12: mod_base = OTHER; note = 2'-O-methyladenosine
  modified_base 13: mod_base = gm
  modified_base 14: mod_base = cm
  modified_base 15: mod_base = OTHER; note = 2'-O-methyladenosine
  modified_base 16: mod_base = um
  modified_base 17: mod_base = cm
  modified_base 18: mod_base = cm
  modified_base 19: mod_base = um
  modified_base 20: mod_base = OTHER; note = 2'-O-methyladenosine
  modified_base 21: mod_base = OTHER; note = 2'-O-methyladenosine
  source 1..21: mol_type = other RNA
tacctttacagagcatcctaa

SEQ ID NO: 1491 - RNA, 21 nt, synthetic construct
  modified_base 1: mod_base = gm
  modified_base 2: mod_base = gm
  modified_base 3: mod_base = OTHER; note = 2'-O-methyladenosine
  modified_base 4: mod_base = OTHER; note = 2'-O-methyladenosine
  modified_base 5: mod_base = cm
  modified_base 6: mod_base = um
  modified_base 7: mod_base = OTHER; note = 2'-O-methyladenosine
  modified_base 8: mod_base = OTHER; note = 2'-O-methyladenosine
  modified_base 9: mod_base = OTHER; note = 2'-fluoroguanosine
  modified_base 10: mod_base = OTHER; note = 2'-fluorouridine
  modified_base 11: mod_base = OTHER; note = 2'-fluorouridine
  modified_base 12: mod_base = OTHER; note = 2'-O-methyladenosine
  modified_base 13: mod_base = OTHER; note = 2'-O-methyladenosine
  modified_base 14: mod_base = gm
  modified_base 15: mod_base = um
  modified_base 16: mod_base = cm
  modified_base 17: mod_base = um
  modified_base 18: mod_base = OTHER; note = 2'-O-methyladenosine
  modified_base 19: mod_base = OTHER; note = 2'-O-methyladenosine
  modified_base 20: mod_base = cm
  modified_base 21: mod_base = um
  source 1..21: mol_type = other RNA
ggaactaagttaagtctaact

SEQ ID NO: 1492 - RNA, 21 nt, synthetic construct
  modified_base 1: mod_base = cm
  modified_base 2: mod_base = um
  modified_base 3: mod_base = cm
  modified_base 4: mod_base = OTHER; note = 2'-O-methyladenosine
  modified_base 5: mod_base = gm
  modified_base 6: mod_base = OTHER; note = 2'-O-methyladenosine
  modified_base 7: mod_base = gm
  modified_base 8: mod_base = OTHER; note = 2'-O-methyladenosine
  modified_base 9: mod_base = OTHER; note = 2'-fluoroguanosine
  modified_base 10: mod_base = OTHER; note = 2'-fluoroadenosine
  modified_base 11: mod_base = OTHER; note = 2'-fluorouridine
  modified_base 12: mod_base = um
  modified_base 13: mod_base = gm
  modified_base 14: mod_base = OTHER; note = 2'-O-methyladenosine
  modified_base 15: mod_base = OTHER; note = 2'-O-methyladenosine
  modified_base 16: mod_base = um
  modified_base 17: mod_base = um
  modified_base 18: mod_base = um
  modified_base 19: mod_base = OTHER; note = 2'-O-methyladenosine
  modified_base 20: mod_base = cm
  modified_base 21: mod_base = um
  source 1..21: mol_type = other RNA
ctcagagagattgaatttact

SEQ ID NO: 1493 - RNA, 21 nt, synthetic construct
  modified_base 1: mod_base = cm
  modified_base 2: mod_base = OTHER; note = 2'-O-methyladenosine
  modified_base 3: mod_base = gm
  modified_base 4: mod_base = cm
  modified_base 5: mod_base = um
  modified_base 6: mod_base = cm
  modified_base 7: mod_base = um
  modified_base 8: mod_base = gm
  modified_base 9: mod_base = OTHER; note = 2'-fluoroguanosine
  modified_base 10: mod_base = OTHER; note = 2'-fluorouridine
  modified_base 11: mod_base = OTHER; note = 2'-fluorouridine
  modified_base 12: mod_base = OTHER; note = 2'-O-methyladenosine
  modified_base 13: mod_base = OTHER; note = 2'-O-methyladenosine
  modified_base 14: mod_base = cm
  modified_base 15: mod_base = OTHER; note = 2'-O-methyladenosine
  modified_base 16: mod_base = um
  modified_base 17: mod_base = cm
  modified_base 18: mod_base = OTHER; note = 2'-O-methyladenosine
  modified_base 19: mod_base = OTHER; note = 2'-O-methyladenosine
  modified_base 20: mod_base = cm
  modified_base 21: mod_base = OTHER; note = 2'-O-methyladenosine
  source 1..21: mol_type = other RNA
cagctctggttaacatcaaca

SEQ ID NO: 1494 - RNA, 21 nt, synthetic construct
  modified_base 1: mod_base = gm
  modified_base 2: mod_base = um
  modified_base 3: mod_base = um
  modified_base 4: mod_base = gm
  modified_base 5: mod_base = OTHER; note = 2'-O-methyladenosine
  modified_base 6: mod_base = cm
  modified_base 7: mod_base = cm
  modified_base 8: mod_base = um
  modified_base 9: mod_base = OTHER; note = 2'-fluoroguanosine
  modified_base 10: mod_base = OTHER; note = 2'-fluoroadenosine
  modified_base 11: mod_base = OTHER; note = 2'-fluorocytidine
  modified_base 12: mod_base = OTHER; note = 2'-O-methyladenosine
  modified_base 13: mod_base = um
  modified_base 14: mod_base = cm
  modified_base 15: mod_base = OTHER; note = 2'-O-methyladenosine
  modified_base 16: mod_base = um
  modified_base 17: mod_base = OTHER; note = 2'-O-methyladenosine
  modified_base 18: mod_base = gm
  modified_base 19: mod_base = um
  modified_base 20: mod_base = um
  modified_base 21: mod_base = um
  source 1..21: mol_type = other RNA
gttgacctgacatcatagttt

SEQ ID NO: 1495 - RNA, 21 nt, synthetic construct
  modified_base 1: mod_base = um
  modified_base 2: mod_base = cm
  modified_base 3: mod_base = OTHER; note = 2'-O-methyladenosine
  modified_base 4: mod_base = OTHER; note = 2'-O-methyladenosine
  modified_base 5: mod_base = OTHER; note = 2'-O-methyladenosine
  modified_base 6: mod_base = cm
  modified_base 7: mod_base = OTHER; note = 2'-O-methyladenosine
  modified_base 8: mod_base = gm
  modified_base 9: mod_base = OTHER; note = 2'-fluoroadenosine
  modified_base 10: mod_base = OTHER; note = 2'-fluorouridine
  modified_base 11: mod_base = OTHER; note = 2'-fluorocytidine
  modified_base 12: mod_base = um
  modified_base 13: mod_base = cm
  modified_base 14: mod_base = gm
  modified_base 15: mod_base = um
  modified_base 16: mod_base = um
  modified_base 17: mod_base = OTHER; note = 2'-O-methyladenosine
  modified_base 18: mod_base = OTHER; note = 2'-O-methyladenosine
  modified_base 19: mod_base = um
  modified_base 20: mod_base = gm
  modified_base 21: mod_base = um
  source 1..21: mol_type = other RNA
tcaaacagatctcgttaatgt

SEQ ID NO: 1496 - RNA, 21 nt, synthetic construct
  modified_base 1: mod_base = gm
  modified_base 2: mod_base = um
  modified_base 3: mod_base = um
  modified_base 4: mod_base = cm
  modified_base 5: mod_base = um
  modified_base 6: mod_base = um
  modified_base 7: mod_base = OTHER; note = 2'-O-methyladenosine
  modified_base 8: mod_base = OTHER; note = 2'-O-methyladenosine
  modified_base 9: mod_base = OTHER; note = 2'-fluoroadenosine
  modified_base 10: mod_base = OTHER; note = 2'-fluoroguanosine
  modified_base 11: mod_base = OTHER; note = 2'-fluorocytidine
  modified_base 12: mod_base = um
  modified_base 13: mod_base = OTHER; note = 2'-O-methyladenosine
  modified_base 14: mod_base = um
  modified_base 15: mod_base = OTHER; note = 2'-O-methyladenosine
  modified_base 16: mod_base = um
  modified_base 17: mod_base = um
  modified_base 18: mod_base = cm
  modified_base 19: mod_base = um
  modified_base 20: mod_base = gm
  modified_base 21: mod_base = OTHER; note = 2'-O-methyladenosine
  source 1..21: mol_type = other RNA
gttcttaaagctatattctga

SEQ ID NO: 1497 - RNA, 21 nt, synthetic construct
  modified_base 1: mod_base = cm
  modified_base 2: mod_base = um
  modified_base 3: mod_base = OTHER; note = 2'-O-methyladenosine
  modified_base 4: mod_base = cm
  modified_base 5: mod_base = OTHER; note = 2'-O-methyladenosine
  modified_base 6: mod_base = cm
  modified_base 7: mod_base = OTHER; note = 2'-O-methyladenosine
  modified_base 8: mod_base = OTHER; note = 2'-O-methyladenosine
  modified_base 9: mod_base = OTHER; note = 2'-fluoroadenosine
  modified_base 10: mod_base = OTHER; note = 2'-fluoroguanosine
  modified_base 11: mod_base = OTHER; note = 2'-fluoroguanosine
  modified_base 12: mod_base = OTHER; note = 2'-O-methyladenosine
  modified_base 13: mod_base = cm
  modified_base 14: mod_base = cm
  modified_base 15: mod_base = um
  modified_base 16: mod_base = OTHER; note = 2'-O-methyladenosine
  modified_base 17: mod_base = cm
  modified_base 18: mod_base = um
  modified_base 19: mod_base = OTHER; note = 2'-O-methyladenosine
  modified_base 20: mod_base = cm
  modified_base 21: mod_base = um
  source 1..21: mol_type = other RNA
ctacacaaaggacctactact

SEQ ID NO: 1498 - RNA, 21 nt, synthetic construct
  modified_base 1: mod_base = gm
  modified_base 2: mod_base = OTHER; note = 2'-O-methyladenosine
  modified_base 3: mod_base = cm
  modified_base 4: mod_base = gm
  modified_base 5: mod_base = um
  modified_base 6: mod_base = cm
  modified_base 7: mod_base = cm
  modified_base 8: mod_base = um
  modified_base 9: mod_base = OTHER; note = 2'-fluorocytidine
  modified_base 10: mod_base = OTHER; note = 2'-fluoroadenosine
  modified_base 11: mod_base = OTHER; note = 2'-fluorouridine
  modified_base 12: mod_base = cm
  modified_base 13: mod_base = OTHER; note = 2'-O-methyladenosine
  modified_base 14: mod_base = OTHER; note = 2'-O-methyladenosine
  modified_base 15: mod_base = OTHER; note = 2'-O-methyladenosine
  modified_base 16: mod_base = um
  modified_base 17: mod_base = OTHER; note = 2'-O-methyladenosine
  modified_base 18: mod_base = gm
  modified_base 19: mod_base = cm
  modified_base 20: mod_base = OTHER; note = 2'-O-methyladenosine
  modified_base 21: mod_base = OTHER; note = 2'-O-methyladenosine
  source 1..21: mol_type = other RNA
gacgtcctcatcaaatagcaa

SEQ ID NO: 1499 - RNA, 21 nt, synthetic construct
  modified_base 1: mod_base = um
  modified_base 2: mod_base = cm
  modified_base 3: mod_base = OTHER; note = 2'-O-methyladenosine
  modified_base 4: mod_base = gm
  modified_base 5: mod_base = OTHER; note = 2'-O-methyladenosine
  modified_base 6: mod_base = OTHER; note = 2'-O-methyladenosine
  modified_base 7: mod_base = cm
  modified_base 8: mod_base = um
  modified_base 9: mod_base = OTHER; note = 2'-fluoroguanosine
  modified_base 10: mod_base = OTHER; note = 2'-fluoroadenosine
  modified_base 11: mod_base = OTHER; note = 2'-fluoroguanosine
  modified_base 12: mod_base = OTHER; note = 2'-O-methyladenosine
  modified_base 13: mod_base = cm
  modified_base 14: mod_base = cm
  modified_base 15: mod_base = um
  modified_base 16: mod_base = cm
  modified_base 17: mod_base = um
  modified_base 18: mod_base = OTHER; note = 2'-O-methyladenosine
  modified_base 19: mod_base = cm
  modified_base 20: mod_base = OTHER; note = 2'-O-methyladenosine
  modified_base 21: mod_base = um
  source 1..21: mol_type = other RNA
tcagaactgagacctctacat

SEQ ID NO: 1500 - RNA, 21 nt, synthetic construct
  modified_base 1: mod_base = um
  modified_base 2: mod_base = gm
  modified_base 3: mod_base = OTHER; note = 2'-O-methyladenosine
  modified_base 4: mod_base = gm
  modified_base 5: mod_base = OTHER; note = 2'-O-methyladenosine
  modified_base 6: mod_base = cm
  modified_base 7: mod_base = cm
  modified_base 8: mod_base = um
  modified_base 9: mod_base = OTHER; note = 2'-fluorocytidine
  modified_base 10: mod_base = OTHER; note = 2'-fluorouridine
  modified_base 11: mod_base = OTHER; note = 2'-fluoroadenosine
  modified_base 12: mod_base = cm
  modified_base 13: mod_base = OTHER; note = 2'-O-methyladenosine
  modified_base 14: mod_base = um
  modified_base 15: mod_base = um
  modified_base 16: mod_base = um
  modified_base 17: mod_base = um
  modified_base 18: mod_base = cm
  modified_base 19: mod_base = um
  modified_base 20: mod_base = um
  modified_base 21: mod_base = um
  source 1..21: mol_type = other RNA
tgagacctctacattttcttt

SEQ ID NO: 1501 - RNA, 21 nt, synthetic construct
  modified_base 1: mod_base = um
  modified_base 2: mod_base = gm
  modified_base 3: mod_base = um
  modified_base 4: mod_base = gm
  modified_base 5: mod_base = OTHER; note = 2'-O-methyladenosine
  modified_base 6: mod_base = um
  modified_base 7: mod_base = um
  modified_base 8: mod_base = um
  modified_base 9: mod_base = OTHER; note = 2'-fluorouridine
  modified_base 10: mod_base = OTHER; note = 2'-fluorocytidine
  modified_base 11: mod_base = OTHER; note = 2'-fluoroadenosine
  modified_base 12: mod_base = cm
  modified_base 13: mod_base = OTHER; note = 2'-O-methyladenosine
  modified_base 14: mod_base = um
  modified_base 15: mod_base = um
  modified_base 16: mod_base = um
  modified_base 17: mod_base = um
  modified_base 18: mod_base = um
  modified_base 19: mod_base = cm
  modified_base 20: mod_base = gm
  modified_base 21: mod_base = um
  source 1..21: mol_type = other RNA
tgtgattttcacatttttcgt

SEQ ID NO: 1502 - RNA, 21 nt, synthetic construct
  modified_base 1: mod_base = OTHER; note = 2'-O-methyladenosine
  modified_base 2: mod_base = OTHER; note = 2'-O-methyladenosine
  modified_base 3: mod_base = cm
  modified_base 4: mod_base = um
  modified_base 5: mod_base = um
  modified_base 6: mod_base = OTHER; note = 2'-O-methyladenosine
  modified_base 7: mod_base = gm
  modified_base 8: mod_base = um
  modified_base 9: mod_base = OTHER; note = 2'-fluoroadenosine
  modified_base 10: mod_base = OTHER; note = 2'-fluoroguanosine
  modified_base 11: mod_base = OTHER; note = 2'-fluoroguanosine
  modified_base 12: mod_base = OTHER; note = 2'-O-methyladenosine
  modified_base 13: mod_base = cm
  modified_base 14: mod_base = um
  modified_base 15: mod_base = um
  modified_base 16: mod_base = cm
  modified_base 17: mod_base = OTHER; note = 2'-O-methyladenosine
  modified_base 18: mod_base = gm
  modified_base 19: mod_base = um
  modified_base 20: mod_base = OTHER; note = 2'-O-methyladenosine
  modified_base 21: mod_base = OTHER; note = 2'-O-methyladenosine
  source 1..21: mol_type = other RNA
aacttagtaggacttcagtaa

SEQ ID NO: 1503 - RNA, 21 nt, synthetic construct
  modified_base 1: mod_base = cm
  modified_base 2: mod_base = um
  modified_base 3: mod_base = cm
  modified_base 4: mod_base = cm
  modified_base 5: mod_base = um
  modified_base 6: mod_base = gm
  modified_base 7: mod_base = cm
  modified_base 8: mod_base = um
  modified_base 9: mod_base = OTHER; note = 2'-fluorouridine
  modified_base 10: mod_base = OTHER; note = 2'-fluorocytidine
  modified_base 11: mod_base = OTHER; note = 2'-fluorouridine
  modified_base 12: mod_base = cm
  modified_base 13: mod_base = cm
  modified_base 14: mod_base = gm
  modified_base 15: mod_base = um
  modified_base 16: mod_base = um
  modified_base 17: mod_base = um
  modified_base 18: mod_base = OTHER; note = 2'-O-methyladenosine
  modified_base 19: mod_base = um
  modified_base 20: mod_base = cm
  modified_base 21: mod_base = um
  source 1..21: mol_type = other RNA
ctcctgcttctccgtttatct

SEQ ID NO: 1504 - RNA, 21 nt, synthetic construct
  modified_base 1: mod_base = um
  modified_base 2: mod_base = gm
  modified_base 3: mod_base = gm
  modified_base 4: mod_base = OTHER; note = 2'-O-methyladenosine
  modified_base 5: mod_base = OTHER; note = 2'-O-methyladenosine
  modified_base 6: mod_base = gm
  modified_base 7: mod_base = OTHER; note = 2'-O-methyladenosine
  modified_base 8: mod_base = OTHER; note = 2'-O-methyladenosine
  modified_base 9: mod_base = OTHER; note = 2'-fluorouridine
  modified_base 10: mod_base = OTHER; note = 2'-fluoroadenosine
  modified_base 11: mod_base = OTHER; note = 2'-fluorouridine
  modified_base 12: mod_base = cm
  modified_base 13: mod_base = cm
  modified_base 14: mod_base = um
  modified_base 15: mod_base = OTHER; note = 2'-O-methyladenosine
  modified_base 16: mod_base = gm
  modified_base 17: mod_base = OTHER; note = 2'-O-methyladenosine
  modified_base 18: mod_base = OTHER; note = 2'-O-methyladenosine
  modified_base 19: mod_base = um
  modified_base 20: mod_base = gm
  modified_base 21: mod_base = um
  source 1..21: mol_type = other RNA
tggaagaatatcctagaatgt

SEQ ID NO: 1505 - RNA, 21 nt, synthetic construct
  modified_base 1: mod_base = OTHER; note = 2'-O-methyladenosine
  modified_base 2: mod_base = OTHER; note = 2'-O-methyladenosine
  modified_base 3: mod_base = gm
  modified_base 4: mod_base = gm
  modified_base 5: mod_base = OTHER; note = 2'-O-methyladenosine
  modified_base 6: mod_base = OTHER; note = 2'-O-methyladenosine
  modified_base 7: mod_base = OTHER; note = 2'-O-methyladenosine
  modified_base 8: mod_base = gm
  modified_base 9: mod_base = OTHER; note = 2'-fluorocytidine
  modified_base 10: mod_base = OTHER; note = 2'-fluoroadenosine
  modified_base 11: mod_base = OTHER; note = 2'-fluorouridine
  modified_base 12: mod_base = OTHER; note = 2'-O-methyladenosine
  modified_base 13: mod_base = um
  modified_base 14: mod_base = gm
  modified_base 15: mod_base = um
  modified_base 16: mod_base = cm
  modified_base 17: mod_base = OTHER; note = 2'-O-methyladenosine
  modified_base 18: mod_base = gm
  modified_base 19: mod_base = um
  modified_base 20: mod_base = um
  modified_base 21: mod_base = OTHER; note = 2'-O-methyladenosine
  source 1..21: mol_type = other RNA
aaggaaagcatatgtcagtta

SEQ ID NO: 1506 - RNA, 21 nt, synthetic construct
  modified_base 1: mod_base = cm
  modified_base 2: mod_base = um
  modified_base 3: mod_base = OTHER; note = 2'-O-methyladenosine
  modified_base 4: mod_base = cm
  modified_base 5: mod_base = um
  modified_base 6: mod_base = gm
  modified_base 7: mod_base = OTHER; note = 2'-O-methyladenosine
  modified_base 8: mod_base = OTHER; note = 2'-O-methyladenosine
  modified_base 9: mod_base = OTHER; note = 2'-fluoroadenosine
  modified_base 10: mod_base = OTHER; note = 2'-fluoroadenosine
  modified_base 11: mod_base = OTHER; note = 2'-fluorocytidine
  modified_base 12: mod_base = cm
  modified_base 13: mod_base = um
  modified_base 14: mod_base = um
  modified_base 15: mod_base = um
  modified_base 16: mod_base = OTHER; note = 2'-O-methyladenosine
  modified_base 17: mod_base = OTHER; note = 2'-O-methyladenosine
  modified_base 18: mod_base = OTHER; note = 2'-O-methyladenosine
  modified_base 19: mod_base = OTHER; note = 2'-O-methylinosine
  modified_base 20: mod_base = gm
  modified_base 21: mod_base = OTHER; note = 2'-O-methyladenosine
  source 1..21: mol_type = other RNA
ctactgaaaacctttaaanga

SEQ ID NO: 1507 - RNA, 21 nt, synthetic construct
  modified_base 1: mod_base = cm
  modified_base 2: mod_base = um
  modified_base 3: mod_base = OTHER; note = 2'-O-methyladenosine
  modified_base 4: mod_base = cm
  modified_base 5: mod_base = um
  modified_base 6: mod_base = gm
  modified_base 7: mod_base = OTHER; note = 2'-O-methyladenosine
  modified_base 8: mod_base = OTHER; note = 2'-O-methyladenosine
  modified_base 9: mod_base = OTHER; note = 2'-fluoroadenosine
  modified_base 10: mod_base = OTHER; note = 2'-O-methyladenosine
  modified_base 11: mod_base = OTHER; note = 2'-fluorocytidine
  modified_base 12: mod_base = cm
  modified_base 13: mod_base = OTHER; note = 2'-fluorouridine
  modified_base 14: mod_base = um
  modified_base 15: mod_base = um
  modified_base 16: mod_base = OTHER; note = 2'-O-methyladenosine
  modified_base 17: mod_base = OTHER; note = 2'-O-methyladenosine
  modified_base 18: mod_base = OTHER; note = 2'-O-methyladenosine
  modified_base 19: mod_base = gm
  modified_base 20: mod_base = gm
  modified_base 21: mod_base = OTHER; note = 2'-O-methyladenosine
  source 1..21: mol_type = other RNA
ctactgaaaacctttaaagga

SEQ ID NO: 1508 - RNA, 21 nt, synthetic construct
  modified_base 1: mod_base = gm
  modified_base 2: mod_base = um
  modified_base 3: mod_base = gm
  modified_base 4: mod_base = gm
  modified_base 5: mod_base = gm
  modified_base 6: mod_base = OTHER; note = 2'-O-methyladenosine
  modified_base 7: mod_base = gm
  modified_base 8: mod_base = OTHER; note = 2'-O-methyladenosine
  modified_base 9: mod_base = OTHER; note = 2'-fluorocytidine
  modified_base 10: mod_base = cm
  modified_base 11: mod_base = OTHER; note = 2'-fluorocytidine
  modified_base 12: mod_base = um
  modified_base 13: mod_base = OTHER; note = 2'-fluoroguanosine
  modified_base 14: mod_base = um
  modified_base 15: mod_base = gm
  modified_base 16: mod_base = um
  modified_base 17: mod_base = OTHER; note = 2'-O-methyladenosine
  modified_base 18: mod_base = cm
  modified_base 19: mod_base = cm
  modified_base 20: mod_base = um
  modified_base 21: mod_base = OTHER; note = 2'-O-methyladenosine
  source 1..21: mol_type = other RNA
gtgggagaccctgtgtaccta

SEQ ID NO: 1509 - RNA, 21 nt, synthetic construct
  modified_base 1: mod_base = gm
  modified_base 2: mod_base = um
  modified_base 3: mod_base = gm
  modified_base 4: mod_base = gm
  modified_base 5: mod_base = gm
  modified_base 6: mod_base = OTHER; note = 2'-O-methyladenosine
  modified_base 7: mod_base = gm
  modified_base 8: mod_base = OTHER; note = 2'-O-methyladenosine
  modified_base 9: mod_base = OTHER; note = 2'-fluorocytidine
  modified_base 10: mod_base = OTHER; note = 2'-fluorocytidine
  modified_base 11: mod_base = OTHER; note = 2'-fluorocytidine
  modified_base 12: mod_base = um
  modified_base 13: mod_base = gm
  modified_base 14: mod_base = um
  modified_base 15: mod_base = gm
  modified_base 16: mod_base = um
  modified_base 17: mod_base = OTHER; note = 2'-O-methyladenosine
  modified_base 18: mod_base = um
  modified_base 19: mod_base = cm
  modified_base 20: mod_base = um
  modified_base 21: mod_base = OTHER; note = 2'-O-methyladenosine
  source 1..21: mol_type = other RNA
gtgggagaccctgtgtatcta

SEQ ID NO: 1510 - RNA, 21 nt, synthetic construct
  modified_base 1: mod_base = OTHER; note = 2'-O-methyladenosine
  modified_base 2: mod_base = OTHER; note = 2'-O-methyladenosine
  modified_base 3: mod_base = um
  modified_base 4: mod_base = gm
  modified_base 5: mod_base = OTHER; note = 2'-O-methyladenosine
  modified_base 6: mod_base = cm
  modified_base 7: mod_base = OTHER; note = 2'-O-methyladenosine
  modified_base 8: mod_base = OTHER; note = 2'-O-methyladenosine
  modified_base 9: mod_base = OTHER; note = 2'-fluoroguanosine
  modified_base 10: mod_base = OTHER; note = 2'-fluoroadenosine
  modified_base 11: mod_base = OTHER; note = 2'-fluorocytidine
  modified_base 12: mod_base = OTHER; note = 2'-O-methyladenosine
  modified_base 13: mod_base = gm
  modified_base 14: mod_base = gm
  modified_base 15: mod_base = OTHER; note = 2'-O-methyladenosine
  modified_base 16: mod_base = um
  modified_base 17: mod_base = um
  modified_base 18: mod_base = cm
  modified_base 19: mod_base = um
  modified_base 20: mod_base = gm
  modified_base 21: mod_base = um
  source 1..21: mol_type = other RNA
aatgacaagacaggattctgt

SEQ ID NO: 1511 - RNA, 21 nt, synthetic construct
  modified_base 1: mod_base = OTHER; note = 2'-O-methyladenosine
  modified_base 2: mod_base = OTHER; note = 2'-O-methyladenosine
  modified_base 3: mod_base = um
  modified_base 4: mod_base = gm
  modified_base 5: mod_base = OTHER; note = 2'-O-methyladenosine
  modified_base 6: mod_base = cm
  modified_base 7: mod_base = OTHER; note = 2'-O-methyladenosine
  modified_base 8: mod_base = OTHER; note = 2'-O-methyladenosine
  modified_base 9: mod_base = OTHER; note = 2'-fluoroguanosine
  modified_base 10: mod_base = OTHER; note = 2'-O-methyladenosine
  modified_base 11: mod_base = OTHER; note = 2'-fluorocytidine
  modified_base 12: mod_base = OTHER; note = 2'-O-methyladenosine
  modified_base 13: mod_base = OTHER; note = 2'-fluoroguanosine
  modified_base 14: mod_base = gm
  modified_base 15: mod_base = OTHER; note = 2'-O-methyladenosine
  modified_base 16: mod_base = um
  modified_base 17: mod_base = um
  modified_base 18: mod_base = cm
  modified_base 19: mod_base = um
  modified_base 20: mod_base = gm
  modified_base 21: mod_base = OTHER; note = 2'-O-methyladenosine
  source 1..21: mol_type = other RNA
aatgacaagacaggattctga

SEQ ID NO: 1512 - RNA, 21 nt, synthetic construct
  modified_base 1: mod_base = OTHER; note = 2'-O-methyladenosine
  modified_base 2: mod_base = OTHER; note = 2'-O-methyladenosine
  modified_base 3: mod_base = cm
  modified_base 4: mod_base = gm
  modified_base 5: mod_base = OTHER; note = 2'-O-methyladenosine
  modified_base 6: mod_base = cm
  modified_base 7: mod_base = OTHER; note = 2'-O-methyladenosine
  modified_base 8: mod_base = OTHER; note = 2'-O-methyladenosine
  modified_base 9: mod_base = OTHER; note = 2'-fluoroguanosine
  modified_base 10: mod_base = OTHER; note = 2'-fluoroadenosine
  modified_base 11: mod_base = OTHER; note = 2'-fluorocytidine
  modified_base 12: mod_base = OTHER; note = 2'-O-methyladenosine
  modified_base 13: mod_base = gm
  modified_base 14: mod_base = gm
  modified_base 15: mod_base = OTHER; note = 2'-O-methyladenosine
  modified_base 16: mod_base = um
  modified_base 17: mod_base = um
  modified_base 18: mod_base = cm
  modified_base 19: mod_base = um
  modified_base 20: mod_base = gm
  modified_base 21: mod_base = OTHER; note = 2'-O-methyladenosine
  source 1..21: mol_type = other RNA
aacgacaagacaggattctga

SEQ ID NO: 1513 - RNA, 21 nt, synthetic construct
  modified_base 1: mod_base = gm
  modified_base 2: mod_base = OTHER; note = 2'-O-methyladenosine
  modified_base 3: mod_base = um
  modified_base 4: mod_base = gm
  modified_base 5: mod_base = OTHER; note = 2'-O-methyladenosine
  modified_base 6: mod_base = cm
  modified_base 7: mod_base = OTHER; note = 2'-O-methyladenosine
  modified_base 8: mod_base = OTHER; note = 2'-O-methyladenosine
  modified_base 9: mod_base = OTHER; note = 2'-fluoroguanosine
  modified_base 10: mod_base = OTHER; note = 2'-fluoroadenosine
  modified_base 11: mod_base = OTHER; note = 2'-fluorocytidine
  modified_base 12: mod_base = OTHER; note = 2'-O-methyladenosine
  modified_base 13: mod_base = gm
  modified_base 14: mod_base = gm
  modified_base 15: mod_base = OTHER; note = 2'-O-methyladenosine
  modified_base 16: mod_base = um
  modified_base 17: mod_base = um
  modified_base 18: mod_base = cm
  modified_base 19: mod_base = um
  modified_base 20: mod_base = gm
  modified_base 21: mod_base = OTHER; note = 2'-O-methyladenosine
  source 1..21: mol_type = other RNA
gatgacaagacaggattctga

SEQ ID NO: 1514 - RNA, 21 nt, synthetic construct
  modified_base 1: mod_base = gm
  modified_base 2: mod_base = OTHER; note = 2'-O-methyladenosine
  modified_base 3: mod_base = um
  modified_base 4: mod_base = gm
  modified_base 5: mod_base = OTHER; note = 2'-O-methyladenosine
  modified_base 6: mod_base = cm
  modified_base 7: mod_base = OTHER; note = 2'-O-methyladenosine
  modified_base 8: mod_base = OTHER; note = 2'-O-methyladenosine
  modified_base 9: mod_base = OTHER; note = 2'-fluoroguanosine
  modified_base 10: mod_base = OTHER; note = 2'-O-methyladenosine
  modified_base 11: mod_base = OTHER; note = 2'-fluorocytidine
  modified_base 12: mod_base = OTHER; note = 2'-O-methyladenosine
  modified_base 13: mod_base = OTHER; note = 2'-fluoroguanosine
  modified_base 14: mod_base = gm
  modified_base 15: mod_base = OTHER; note = 2'-O-methyladenosine
  modified_base 16: mod_base = um
  modified_base 17: mod_base = um
  modified_base 18: mod_base = cm
  modified_base 19: mod_base = um
  modified_base 20: mod_base = gm
  modified_base 21: mod_base = um
  source 1..21: mol_type = other RNA
gatgacaagacaggattctgt

SEQ ID NO: 1515 - RNA, 21 nt, synthetic construct
  modified_base 1: mod_base = gm
  modified_base 2: mod_base = OTHER; note = 2'-O-methyladenosine
  modified_base 3: mod_base = um
  modified_base 4: mod_base = gm
  modified_base 5: mod_base = OTHER; note = 2'-O-methyladenosine
  modified_base 6: mod_base = cm
  modified_base 7: mod_base = OTHER; note = 2'-O-methyladenosine
  modified_base 8: mod_base = OTHER; note = 2'-O-methyladenosine
  modified_base 9: mod_base = OTHER; note = 2'-fluoroguanosine
  modified_base 10: mod_base = OTHER; note = 2'-fluoroadenosine
  modified_base 11: mod_base = OTHER; note = 2'-fluorocytidine
  modified_base 12: mod_base = OTHER; note = 2'-O-methyladenosine
  modified_base 13: mod_base = gm
  modified_base 14: mod_base = gm
  modified_base 15: mod_base = OTHER; note = 2'-O-methyladenosine
  modified_base 16: mod_base = um
  modified_base 17: mod_base = um
  modified_base 18: mod_base = cm
  modified_base 19: mod_base = um
  modified_base 20: mod_base = gm
  modified_base 21: mod_base = um
  source 1..21: mol_type = other RNA
gatgacaagacaggattctgt

SEQ ID NO: 1516 - RNA, 21 nt, synthetic construct
  modified_base 1: mod_base = gm
  modified_base 2: mod_base = um
  modified_base 3: mod_base = cm
  modified_base 4: mod_base = cm
  modified_base 5: mod_base = um
  modified_base 6: mod_base = gm
  modified_base 7: mod_base = gm
  modified_base 8: mod_base = OTHER; note = 2'-O-methyladenosine
  modified_base 9: mod_base = OTHER; note = 2'-fluoroadenosine
  modified_base 10: mod_base = OTHER; note = 2'-fluorouridine
  modified_base 11: mod_base = OTHER; note = 2'-fluoroadenosine
  modified_base 12: mod_base = um
  modified_base 13: mod_base = um
  modified_base 14: mod_base = OTHER; note = 2'-O-methyladenosine
  modified_base 15: mod_base = gm
  modified_base 16: mod_base = OTHER; note = 2'-O-methyladenosine
  modified_base 17: mod_base = um
  modified_base 18: mod_base = gm
  modified_base 19: mod_base = cm
  modified_base 20: mod_base = cm
  modified_base 21: mod_base = um
  source 1..21: mol_type = other RNA
gtcctggaatattagatgcct

SEQ ID NO: 1517 - RNA, 21 nt, synthetic construct
  modified_base 1: mod_base = um
  modified_base 2: mod_base = gm
  modified_base 3: mod_base = um
  modified_base 4: mod_base = cm
  modified_base 5: mod_base = cm
  modified_base 6: mod_base = um
  modified_base 7: mod_base = gm
  modified_base 8: mod_base = gm
  modified_base 9: mod_base = OTHER; note = 2'-fluoroadenosine
  modified_base 10: mod_base = OTHER; note = 2'-fluoroadenosine
  modified_base 11: mod_base = OTHER; note = 2'-fluorouridine
  modified_base 12: mod_base = OTHER; note = 2'-O-methyladenosine
  modified_base 13: mod_base = um
  modified_base 14: mod_base = um
  modified_base 15: mod_base = OTHER; note = 2'-O-methyladenosine
  modified_base 16: mod_base = gm
  modified_base 17: mod_base = OTHER; note = 2'-O-methyladenosine
  modified_base 18: mod_base = um
  modified_base 19: mod_base = gm
  modified_base 20: mod_base = cm
  modified_base 21: mod_base = um
  source 1..21: mol_type = other RNA
tgtcctggaatattagatgct

SEQ ID NO: 1518 - RNA, 21 nt, synthetic construct
  modified_base 1: mod_base = um
  modified_base 2: mod_base = cm
  modified_base 3: mod_base = cm
  modified_base 4: mod_base = um
  modified_base 5: mod_base = gm
  modified_base 6: mod_base = gm
  modified_base 7: mod_base = OTHER; note = 2'-O-methyladenosine
  modified_base 8: mod_base = OTHER; note = 2'-O-methyladenosine
  modified_base 9: mod_base = OTHER; note = 2'-fluorouridine
  modified_base 10: mod_base = OTHER; note = 2'-fluoroadenosine
  modified_base 11: mod_base = OTHER; note = 2'-fluorouridine
  modified_base 12: mod_base = um
  modified_base 13: mod_base = OTHER; note = 2'-O-methyladenosine
  modified_base 14: mod_base = gm
  modified_base 15: mod_base = OTHER; note = 2'-O-methyladenosine
  modified_base 16: mod_base = um
  modified_base 17: mod_base = gm
  modified_base 18: mod_base = cm
  modified_base 19: mod_base = cm
  modified_base 20: mod_base = um
  modified_base 21: mod_base = um
  source 1..21: mol_type = other RNA
tcctggaatattagatgcctt

SEQ ID NO: 1519 - RNA, 21 nt, synthetic construct
  modified_base 1: mod_base = gm
  modified_base 2: mod_base = um
  modified_base 3: mod_base = um
  modified_base 4: mod_base = cm
  modified_base 5: mod_base = um
  modified_base 6: mod_base = cm
  modified_base 7: mod_base = OTHER; note = 2'-O-methyladenosine
  modified_base 8: mod_base = OTHER; note = 2'-O-methyladenosine
  modified_base 9: mod_base = OTHER; note = 2'-fluoroadenosine
  modified_base 10: mod_base = OTHER; note = 2'-O-methyladenosine
  modified_base 11: mod_base = OTHER; note = 2'-fluoroadenosine
  modified_base 12: mod_base = um
  modified_base 13: mod_base = OTHER; note = 2'-fluoroguanosine
  modified_base 14: mod_base = OTHER; note = 2'-O-methyladenosine
  modified_base 15: mod_base = cm
  modified_base 16: mod_base = OTHER; note = 2'-O-methyladenosine
  modified_base 17: mod_base = OTHER; note = 2'-O-methyladenosine
  modified_base 18: mod_base = cm
  modified_base 19: mod_base = OTHER; note = 2'-O-methyladenosine
  modified_base 20: mod_base = cm
  modified_base 21: mod_base = OTHER; note = 2'-O-methyladenosine
  source 1..21: mol_type = other RNA
gttctcaaaaatgacaacaca

SEQ ID NO: 1520 - RNA, 21 nt, synthetic construct
  modified_base 1: mod_base = um
  modified_base 2: mod_base = gm
  modified_base 3: mod_base = cm
  modified_base 4: mod_base = cm
  modified_base 5: mod_base = OTHER; note = 2'-O-methyladenosine
  modified_base 6: mod_base = um
  modified_base 7: mod_base = um
  modified_base 8: mod_base = um
  modified_base 9: mod_base = OTHER; note = 2'-fluorouridine
  modified_base 10: mod_base = gm
  modified_base 11: mod_base = OTHER; note = 2'-fluorouridine
  modified_base 12: mod_base = cm
  modified_base 13: mod_base = OTHER; note = 2'-fluorocytidine
  modified_base 14: mod_base = um
  modified_base 15: mod_base = um
  modified_base 16: mod_base = um
  modified_base 17: mod_base = gm
  modified_base 18: mod_base = OTHER; note = 2'-O-methyladenosine
  modified_base 19: mod_base = um
  modified_base 20: mod_base = um
  modified_base 21: mod_base = OTHER; note = 2'-O-methyladenosine
  source 1..21: mol_type = other RNA
tgccattttgtcctttgatta

SEQ ID NO: 1521 - RNA, 21 nt, synthetic construct
  modified_base 1: mod_base = OTHER; note = 2'-O-methyladenosine
  modified_base 2: mod_base = OTHER; note = 2'-O-methyladenosine
  modified_base 3: mod_base = cm
  modified_base 4: mod_base = gm
  modified_base 5: mod_base = OTHER; note = 2'-O-methyladenosine
  modified_base 6: mod_base = cm
  modified_base 7: mod_base = OTHER; note = 2'-O-methyladenosine
  modified_base 8: mod_base = OTHER; note = 2'-O-methyladenosine
  modified_base 9: mod_base = OTHER; note = 2'-fluoroguanosine
  modified_base 10: mod_base = OTHER; note = 2'-fluoroadenosine
  modified_base 11: mod_base = OTHER; note = 2'-fluorocytidine
  modified_base 12: mod_base = OTHER; note = 2'-O-methyladenosine
  modified_base 13: mod_base = gm
  modified_base 14: mod_base = gm
  modified_base 15: mod_base = OTHER; note = 2'-O-methyladenosine
  modified_base 16: mod_base = um
  modified_base 17: mod_base = um
  modified_base 18: mod_base = cm
  modified_base 19: mod_base = um
  modified_base 20: mod_base = gm
  modified_base 21: mod_base = um
  source 1..21: mol_type = other RNA
aacgacaagacaggattctgt

SEQ ID NO: 1522 - RNA, 21 nt, synthetic construct
  modified_base 1: mod_base = cm
  modified_base 2: mod_base = gm
  modified_base 3: mod_base = gm
  modified_base 4: mod_base = um
  modified_base 5: mod_base = gm
  modified_base 6: mod_base = um
  modified_base 7: mod_base = cm
  modified_base 8: mod_base = um
  modified_base 9: mod_base = OTHER; note = 2'-fluorocytidine
  modified_base 10: mod_base = OTHER; note = 2'-fluoroadenosine
  modified_base 11: mod_base = OTHER; note = 2'-fluoroadenosine
  modified_base 12: mod_base = um
  modified_base 13: mod_base = gm
  modified_base 14: mod_base = cm
  modified_base 15: mod_base = um
  modified_base 16: mod_base = um
  modified_base 17: mod_base = cm
  modified_base 18: mod_base = OTHER; note = 2'-O-methyladenosine
  modified_base 19: mod_base = OTHER; note = 2'-O-methyladenosine
  modified_base 20: mod_base = um
  modified_base 21: mod_base = OTHER; note = 2'-O-methyladenosine
  source 1..21: mol_type = other RNA
cggtgtctcaatgcttcaata

SEQ ID NO: 1523 - RNA, 21 nt, synthetic construct
  modified_base 1: mod_base = cm
  modified_base 2: mod_base = gm
  modified_base 3: mod_base = OTHER; note = 2'-O-methyladenosine
  modified_base 4: mod_base = um
  modified_base 5: mod_base = gm
  modified_base 6: mod_base = um
  modified_base 7: mod_base = cm
  modified_base 8: mod_base = um
  modified_base 9: mod_base = OTHER; note = 2'-fluorocytidine
  modified_base 10: mod_base = OTHER; note = 2'-fluoroadenosine
  modified_base 11: mod_base = OTHER; note = 2'-fluoroadenosine
  modified_base 12: mod_base = um
  modified_base 13: mod_base = gm
  modified_base 14: mod_base = cm
  modified_base 15: mod_base = um
  modified_base 16: mod_base = um
  modified_base 17: mod_base = cm
  modified_base 18: mod_base = OTHER; note = 2'-O-methyladenosine
  modified_base 19: mod_base = OTHER; note = 2'-O-methyladenosine
  modified_base 20: mod_base = um
  modified_base 21: mod_base = OTHER; note = 2'-O-methyladenosine
  source 1..21: mol_type = other RNA
cgatgtctcaatgcttcaata

SEQ ID NO: 1524 - RNA, 21 nt, synthetic construct
  modified_base 1: mod_base = gm
  modified_base 2: mod_base = OTHER; note = 2'-O-methyladenosine
  modified_base 3: mod_base = cm
  modified_base 4: mod_base = gm
  modified_base 5: mod_base = OTHER; note = 2'-O-methyladenosine
  modified_base 6: mod_base = cm
  modified_base 7: mod_base = OTHER; note = 2'-O-methyladenosine
  modified_base 8: mod_base = OTHER; note = 2'-O-methyladenosine
  modified_base 9: mod_base = OTHER; note = 2'-fluoroguanosine
  modified_base 10: mod_base = OTHER; note = 2'-fluoroadenosine
  modified_base 11: mod_base = OTHER; note = 2'-fluorocytidine
  modified_base 12: mod_base = OTHER; note = 2'-O-methyladenosine
  modified_base 13: mod_base = gm
  modified_base 14: mod_base = gm
  modified_base 15: mod_base = OTHER; note = 2'-O-methyladenosine
  modified_base 16: mod_base = um
  modified_base 17: mod_base = um
  modified_base 18: mod_base = cm
  modified_base 19: mod_base = um
  modified_base 20: mod_base = gm
  modified_base 21: mod_base = OTHER; note = 2'-O-methyladenosine
  source 1..21: mol_type = other RNA
gacgacaagacaggattctga

SEQ ID NO: 1525 - RNA, 21 nt, synthetic construct
  modified_base 1: mod_base = OTHER; note = 2'-O-methyladenosine
  modified_base 2: mod_base = gm
  modified_base 3: mod_base = gm
  modified_base 4: mod_base = cm
  modified_base 5: mod_base = um
  modified_base 6: mod_base = OTHER; note = 2'-O-methyladenosine
  modified_base 7: mod_base = gm
  modified_base 8: mod_base = OTHER; note = 2'-O-methyladenosine
  modified_base 9: mod_base = OTHER; note = 2'-fluoroguanosine
  modified_base 10: mod_base = OTHER; note = 2'-fluoroadenosine
  modified_base 11: mod_base = OTHER; note = 2'-fluoroadenosine
  modified_base 12: mod_base = gm
  modified_base 13: mod_base = OTHER; note = 2'-O-methyladenosine
  modified_base 14: mod_base = OTHER; note = 2'-O-methyladenosine
  modified_base 15: mod_base = OTHER; note = 2'-O-methyladenosine
  modified_base 16: mod_base = gm
  modified_base 17: mod_base = um
  modified_base 18: mod_base = um
  modified_base 19: mod_base = OTHER; note = 2'-O-methyladenosine
  modified_base 20: mod_base = OTHER; note = 2'-O-methyladenosine
  modified_base 21: mod_base = OTHER; note = 2'-O-methyladenosine
  source 1..21: mol_type = other RNA
aggctagagaagaaagttaaa

SEQ ID NO: 1526 - RNA, 21 nt, synthetic construct
  modified_base 1: mod_base = gm
  modified_base 2: mod_base = OTHER; note = 2'-O-methyladenosine
  modified_base 3: mod_base = OTHER; note = 2'-O-methyladenosine
  modified_base 4: mod_base = um
  modified_base 5: mod_base = gm
  modified_base 6: mod_base = OTHER; note = 2'-O-methyladenosine
  modified_base 7: mod_base = cm
  modified_base 8: mod_base = OTHER; note = 2'-O-methyladenosine
  modified_base 9: mod_base = OTHER; note = 2'-fluoroadenosine
  modified_base 10: mod_base = OTHER; note = 2'-fluoroguanosine
  modified_base 11: mod_base = OTHER; note = 2'-fluoroadenosine
  modified_base 12: mod_base = cm
  modified_base 13: mod_base = OTHER; note = 2'-O-methyladenosine
  modified_base 14: mod_base = gm
  modified_base 15: mod_base = gm
  modified_base 16: mod_base = OTHER; note = 2'-O-methyladenosine
  modified_base 17: mod_base = um
  modified_base 18: mod_base = um
  modified_base 19: mod_base = cm
  modified_base 20: mod_base = um
  modified_base 21: mod_base = OTHER; note = 2'-O-methyladenosine
  source 1..21: mol_type = other RNA
gaatgacaagacaggattcta

SEQ ID NO: 1527 - RNA, 21 nt, synthetic construct
  modified_base 1: mod_base = gm
  modified_base 2: mod_base = um
  modified_base 3: mod_base = gm
  modified_base 4: mod_base = OTHER; note = 2'-O-methyladenosine
  modified_base 5: mod_base = cm
  modified_base 6: mod_base = OTHER; note = 2'-O-methyladenosine
  modified_base 7: mod_base = OTHER; note = 2'-O-methyladenosine
  modified_base 8: mod_base = gm
  modified_base 9: mod_base = OTHER; note = 2'-fluoroadenosine
  modified_base 10: mod_base = OTHER; note = 2'-fluorocytidine
  modified_base 11: mod_base = OTHER; note = 2'-fluoroadenosine
  modified_base 12: mod_base = gm
  modified_base 13: mod_base = gm
  modified_base 14: mod_base = OTHER; note = 2'-O-methyladenosine
  modified_base 15: mod_base = um
  modified_base 16: mod_base = um
  modified_base 17: mod_base = cm
  modified_base 18: mod_base = um
  modified_base 19: mod_base = gm
  modified_base 20: mod_base = OTHER; note = 2'-O-methyladenosine
  modified_base 21: mod_base = OTHER; note = 2'-O-methyladenosine
  source 1..21: mol_type = other RNA
gtgacaagacaggattctgaa

SEQ ID NO: 1528 - RNA, 20 nt, synthetic construct
  modified_base 1: mod_base = cm
  modified_base 2: mod_base = cm
  modified_base 3: mod_base = um
  modified_base 4: mod_base = gm
  modified_base 5: mod_base = gm
  modified_base 6: mod_base = OTHER; note = 2'-O-methyladenosine
  modified_base 7: mod_base = OTHER; note = 2'-fluoroadenosine
  modified_base 8: mod_base = um
  modified_base 9: mod_base = OTHER; note = 2'-fluoroadenosine
  modified_base 10: mod_base = OTHER; note = 2'-fluorouridine
  modified_base 11: mod_base = OTHER; note = 2'-fluorouridine
  modified_base 12: mod_base = OTHER; note = 2'-fluoroadenosine
  modified_base 13: mod_base = gm
  modified_base 14: mod_base = OTHER; note = 2'-O-methyladenosine
  modified_base 15: mod_base = um
  modified_base 16: mod_base = gm
  modified_base 17: mod_base = cm
  modified_base 18: mod_base = cm
  modified_base 19: mod_base = um
  modified_base 20: mod_base = um
  source 1..20: mol_type = other RNA
cctggaatattagatgcctt

SEQ ID NO: 1529 - RNA, 21 nt, synthetic construct
  modified_base 1: mod_base = OTHER; note = 2'-O-methyladenosine
  modified_base 2: mod_base = OTHER; note = 2'-O-methyladenosine
  modified_base 3: mod_base = cm
  modified_base 4: mod_base = gm
  modified_base 5: mod_base = OTHER; note = 2'-O-methyladenosine
  modified_base 6: mod_base = cm
  modified_base 7: mod_base = OTHER; note = 2'-O-methyladenosine
  modified_base 8: mod_base = OTHER; note = 2'-O-methyladenosine
  modified_base 9: mod_base = OTHER; note = 2'-fluoroguanosine
  modified_base 10: mod_base = OTHER; note = 2'-fluoroadenosine
  modified_base 11: mod_base = OTHER; note = 2'-fluorocytidine
  modified_base 12: mod_base = OTHER; note = 2'-O-methyladenosine
  modified_base 13: mod_base = gm
  modified_base 14: mod_base = gm
  modified_base 15: mod_base = OTHER; note = 2'-O-methyladenosine
  modified_base 16: mod_base = um
  modified_base 17: mod_base = um
  modified_base 18: mod_base = cm
  modified_base 19: mod_base = um
  modified_base 20: mod_base = gm
  modified_base 21: mod_base = um
  source 1..21: mol_type = other RNA
aacgacaagacaggattctgt

SEQ ID NO: 1530 - RNA, 21 nt, synthetic construct
  modified_base 1: mod_base = OTHER; note = 2'-O-methyladenosine
  modified_base 2: mod_base = OTHER; note = 2'-O-methyladenosine
  modified_base 3: mod_base = cm
  modified_base 4: mod_base = gm
  modified_base 5: mod_base = OTHER; note = 2'-O-methyladenosine
  modified_base 6: mod_base = cm
  modified_base 7: mod_base = OTHER; note = 2'-O-methyladenosine
  modified_base 8: mod_base = OTHER; note = 2'-O-methyladenosine
  modified_base 9: mod_base = OTHER; note = 2'-fluoroguanosine
  modified_base 10: mod_base = OTHER; note = 2'-fluoroadenosine
  modified_base 11: mod_base = OTHER; note = 2'-fluorocytidine
  modified_base 12: mod_base = OTHER; note = 2'-O-methyladenosine
  modified_base 13: mod_base = gm
  modified_base 14: mod_base = gm
  modified_base 15: mod_base = OTHER; note = 2'-O-methyladenosine
  modified_base 16: mod_base = um
  modified_base 17: mod_base = um
  modified_base 18: mod_base = cm
  modified_base 19: mod_base = um
  modified_base 20: mod_base = gm
  modified_base 21: mod_base = um
  source 1..21: mol_type = other RNA
aacgacaagacaggattctgt

SEQ ID NO: 1531 - RNA, 21 nt, synthetic construct
  modified_base 1: mod_base = OTHER; note = 2'-O-methyladenosine
  modified_base 2: mod_base = OTHER; note = 2'-O-methyladenosine
  modified_base 3: mod_base = cm
  modified_base 4: mod_base = gm
  modified_base 5: mod_base = OTHER; note = 2'-O-methyladenosine
  modified_base 6: mod_base = cm
  modified_base 7: mod_base = OTHER; note = 2'-O-methyladenosine
  modified_base 8: mod_base = OTHER; note = 2'-O-methyladenosine
  modified_base 9: mod_base = OTHER; note = 2'-fluoroguanosine
  modified_base 10: mod_base = OTHER; note = 2'-fluoroadenosine
  modified_base 11: mod_base = OTHER; note = 2'-fluorocytidine
  modified_base 12: mod_base = OTHER; note = 2'-O-methyladenosine
  modified_base 13: mod_base = gm
  modified_base 14: mod_base = gm
  modified_base 15: mod_base = OTHER; note = 2'-O-methyladenosine
  modified_base 16: mod_base = um
  modified_base 17: mod_base = um
  modified_base 18: mod_base = cm
  modified_base 19: mod_base = um
  modified_base 20: mod_base = gm
  modified_base 21: mod_base = um
  source 1..21: mol_type = other RNA
aacgacaagacaggattctgt

SEQ ID NO: 1532 - RNA, 21 nt, synthetic construct
  modified_base 1: mod_base = OTHER; note = 2'-O-methyladenosine
  modified_base 2: mod_base = OTHER; note = 2'-O-methyladenosine
  modified_base 3: mod_base = cm
  modified_base 4: mod_base = gm
  modified_base 5: mod_base = OTHER; note = 2'-O-methyladenosine
  modified_base 6: mod_base = cm
  modified_base 7: mod_base = OTHER; note = 2'-O-methyladenosine
  modified_base 8: mod_base = OTHER; note = 2'-O-methyladenosine
  modified_base 9: mod_base = OTHER; note = 2'-fluoroguanosine
  modified_base 10: mod_base = OTHER; note = 2'-fluoroadenosine
  modified_base 11: mod_base = OTHER; note = 2'-fluorocytidine
  modified_base 12: mod_base = OTHER; note = 2'-O-methyladenosine
  modified_base 13: mod_base = gm
  modified_base 14: mod_base = gm
  modified_base 15: mod_base = OTHER; note = 2'-O-methyladenosine
  modified_base 16: mod_base = um
  modified_base 17: mod_base = um
  modified_base 18: mod_base = cm
  modified_base 19: mod_base = um
  modified_base 20: mod_base = gm
  modified_base 21: mod_base = um
  source 1..21: mol_type = other RNA
aacgacaagacaggattctgt

SEQ ID NO: 1533 - RNA, 21 nt, synthetic construct
  modified_base 1: mod_base = OTHER; note = 2'-O-methyladenosine
  modified_base 2: mod_base = OTHER; note = 2'-O-methyladenosine
  modified_base 3: mod_base = cm
  modified_base 4: mod_base = gm
  modified_base 5: mod_base = OTHER; note = 2'-O-methyladenosine
  modified_base 6: mod_base = cm
  modified_base 7: mod_base = OTHER; note = 2'-O-methyladenosine
  modified_base 8: mod_base = OTHER; note = 2'-O-methyladenosine
  modified_base 9: mod_base = OTHER; note = 2'-fluoroguanosine
  modified_base 10: mod_base = OTHER; note = 2'-fluoroadenosine
  modified_base 11: mod_base = OTHER; note = 2'-fluorocytidine
  modified_base 12: mod_base = OTHER; note = 2'-O-methyladenosine
  modified_base 13: mod_base = gm
  modified_base 14: mod_base = gm
  modified_base 15: mod_base = OTHER; note = 2'-O-methyladenosine
  modified_base 16: mod_base = um
  modified_base 17: mod_base = um
  modified_base 18: mod_base = cm
  modified_base 19: mod_base = um
  modified_base 20: mod_base = gm
  modified_base 21: mod_base = um
  source 1..21: mol_type = other RNA
aacgacaagacaggattctgt

SEQ ID NO: 1534 - RNA, 21 nt, synthetic construct
  modified_base 1: mod_base = gm
  modified_base 2: mod_base = OTHER; note = 2'-O-methyladenosine
  modified_base 3: mod_base = um
  modified_base 4: mod_base = um
  modified_base 5: mod_base = OTHER; note = 2'-O-methyladenosine
  modified_base 6: mod_base = um
  modified_base 7: mod_base = gm
  modified_base 8: mod_base = gm
  modified_base 9: mod_base = OTHER; note = 2'-fluoroadenosine
  modified_base 10: mod_base = OTHER; note = 2'-fluoroadenosine
  modified_base 11: mod_base = OTHER; note = 2'-fluorouridine
  modified_base 12: mod_base = OTHER; note = 2'-O-methyladenosine
  modified_base 13: mod_base = gm
  modified_base 14: mod_base = gm
  modified_base 15: mod_base = um
  modified_base 16: mod_base = cm
  modified_base 17: mod_base = um
  modified_base 18: mod_base = um
  modified_base 19: mod_base = um
  modified_base 20: mod_base = cm
  modified_base 21: mod_base = OTHER; note = 2'-O-methyladenosine
  source 1..21: mol_type = other RNA
gattatggaataggtctttca

SEQ ID NO: 1535 - RNA, 21 nt, synthetic construct
  modified_base 1: mod_base = um
  modified_base 2: mod_base = cm
  modified_base 3: mod_base = OTHER; note = 2'-O-methyladenosine
  modified_base 4: mod_base = gm
  modified_base 5: mod_base = um
  modified_base 6: mod_base = gm
  modified_base 7: mod_base = cm
  modified_base 8: mod_base = OTHER; note = 2'-O-methyladenosine
  modified_base 9: mod_base = OTHER; note = 2'-fluoroguanosine
  modified_base 10: mod_base = OTHER; note = 2'-fluorocytidine
  modified_base 11: mod_base = OTHER; note = 2'-fluorocytidine
  modified_base 12: mod_base = um
  modified_base 13: mod_base = OTHER; note = 2'-O-methyladenosine
  modified_base 14: mod_base = cm
  modified_base 15: mod_base = OTHER; note = 2'-O-methyladenosine
  modified_base 16: mod_base = cm
  modified_base 17: mod_base = OTHER; note = 2'-O-methyladenosine
  modified_base 18: mod_base = OTHER; note = 2'-O-methyladenosine
  modified_base 19: mod_base = OTHER; note = 2'-O-methyladenosine
  modified_base 20: mod_base = gm
  modified_base 21: mod_base = OTHER; note = 2'-O-methyladenosine
  source 1..21: mol_type = other RNA
tcagtgcagcctacacaaaga

SEQ ID NO: 1536 - RNA, 21 nt, synthetic construct
  modified_base 1: mod_base = cm
  modified_base 2: mod_base = gm
  modified_base 3: mod_base = cm
  modified_base 4: mod_base = um
  modified_base 5: mod_base = gm
  modified_base 6: mod_base = gm
  modified_base 7: mod_base = OTHER; note = 2'-O-methyladenosine
  modified_base 8: mod_base = OTHER; note = 2'-O-methyladenosine
  modified_base 9: mod_base = OTHER; note = 2'-fluoroadenosine
  modified_base 10: mod_base = OTHER; note = 2'-fluorocytidine
  modified_base 11: mod_base = OTHER; note = 2'-fluoroadenosine
  modified_base 12: mod_base = cm
  modified_base 13: mod_base = um
  modified_base 14: mod_base = gm
  modified_base 15: mod_base = OTHER; note = 2'-O-methyladenosine
  modified_base 16: mod_base = OTHER; note = 2'-O-methyladenosine
  modified_base 17: mod_base = gm
  modified_base 18: mod_base = OTHER; note = 2'-O-methyladenosine
  modified_base 19: mod_base = gm
  modified_base 20: mod_base = um
  modified_base 21: mod_base = um
  source 1..21: mol_type = other RNA
cgctggaaacactgaagagtt

SEQ ID NO: 1537 - RNA, 21 nt, synthetic construct
  modified_base 1: mod_base = gm
  modified_base 2: mod_base = um
  modified_base 3: mod_base = gm
  modified_base 4: mod_base = gm
  modified_base 5: mod_base = gm
  modified_base 6: mod_base = OTHER; note = 2'-O-methyladenosine
  modified_base 7: mod_base = gm
  modified_base 8: mod_base = OTHER; note = 2'-O-methyladenosine
  modified_base 9: mod_base = OTHER; note = 2'-fluorocytidine
  modified_base 10: mod_base = OTHER; note = 2'-fluorocytidine
  modified_base 11: mod_base = OTHER; note = 2'-fluorocytidine
  modified_base 12: mod_base = um
  modified_base 13: mod_base = gm
  modified_base 14: mod_base = um
  modified_base 15: mod_base = gm
  modified_base 16: mod_base = um
  modified_base 17: mod_base = OTHER; note = 2'-O-methyladenosine
  modified_base 18: mod_base = cm
  modified_base 19: mod_base = cm
  modified_base 20: mod_base = um
  modified_base 21: mod_base = OTHER; note = 2'-O-methyladenosine
  source 1..21: mol_type = other RNA
gtgggagaccctgtgtaccta

SEQ ID NO: 1538 - RNA, 21 nt, synthetic construct
  modified_base 1: mod_base = gm
  modified_base 2: mod_base = OTHER; note = 2'-O-methyladenosine
  modified_base 3: mod_base = um
  modified_base 4: mod_base = um
  modified_base 5: mod_base = OTHER; note = 2'-O-methyladenosine
  modified_base 6: mod_base = um
  modified_base 7: mod_base = gm
  modified_base 8: mod_base = gm
  modified_base 9: mod_base = OTHER; note = 2'-fluoroadenosine
  modified_base 10: mod_base = OTHER; note = 2'-fluoroadenosine
  modified_base 11: mod_base = OTHER; note = 2'-fluorouridine
  modified_base 12: mod_base = OTHER; note = 2'-O-methyladenosine
  modified_base 13: mod_base = gm
  modified_base 14: mod_base = um
  modified_base 15: mod_base = um
  modified_base 16: mod_base = cm
  modified_base 17: mod_base = um
  modified_base 18: mod_base = um
  modified_base 19: mod_base = um
  modified_base 20: mod_base = cm
  modified_base 21: mod_base = OTHER; note = 2'-O-methyladenosine
  source 1..21: mol_type = other RNA
gattatggaatagttctttca

SEQ ID NO: 1539 - RNA, 21 nt, synthetic construct
  modified_base 1: mod_base = OTHER; note = 2'-O-methyladenosine
  modified_base 2: mod_base = OTHER; note = 2'-O-methyladenosine
  modified_base 3: mod_base = cm
  modified_base 4: mod_base = gm
  modified_base 5: mod_base = OTHER; note = 2'-O-methyladenosine
  modified_base 6: mod_base = cm
  modified_base 7: mod_base = OTHER; note = 2'-O-methyladenosine
  modified_base 8: mod_base = OTHER; note = 2'-O-methyladenosine
  modified_base 9: mod_base = OTHER; note = 2'-fluoroguanosine
  modified_base 10: mod_base = OTHER; note = 2'-fluoroadenosine
  modified_base 11: mod_base = OTHER; note = 2'-fluorocytidine
  modified_base 12: mod_base = OTHER; note = 2'-O-methyladenosine
  modified_base 13: mod_base = gm
  modified_base 14: mod_base = gm
  modified_base 15: mod_base = OTHER; note = 2'-O-methyladenosine
  modified_base 16: mod_base = um
  modified_base 17: mod_base = um
  modified_base 18: mod_base = cm
  modified_base 19: mod_base = um
  modified_base 20: mod_base = gm
  modified_base 21: mod_base = OTHER; note = 2'-O-methyladenosine
  source 1..21: mol_type = other RNA
aacgacaagacaggattctga

SEQ ID NO: 1540 - RNA, 21 nt, synthetic construct
  modified_base 1: mod_base = gm
  modified_base 2: mod_base = OTHER; note = 2'-O-methyladenosine
  modified_base 3: mod_base = um
  modified_base 4: mod_base = gm
  modified_base 5: mod_base = OTHER; note = 2'-O-methyladenosine
  modified_base 6: mod_base = cm
  modified_base 7: mod_base = OTHER; note = 2'-O-methyladenosine
  modified_base 8: mod_base = OTHER; note = 2'-O-methyladenosine
  modified_base 9: mod_base = OTHER; note = 2'-fluoroguanosine
  modified_base 10: mod_base = OTHER; note = 2'-fluoroadenosine
  modified_base 11: mod_base = OTHER; note = 2'-fluorocytidine
  modified_base 12: mod_base = OTHER; note = 2'-O-methyladenosine
  modified_base 13: mod_base = gm
  modified_base 14: mod_base = gm
  modified_base 15: mod_base = OTHER; note = 2'-O-methyladenosine
  modified_base 16: mod_base = um
  modified_base 17: mod_base = um
  modified_base 18: mod_base = cm
  modified_base 19: mod_base = um
  modified_base 20: mod_base = gm
  modified_base 21: mod_base = OTHER; note = 2'-O-methyladenosine
  source 1..21: mol_type = other RNA
gatgacaagacaggattctga

SEQ ID NO: 1541 - RNA, 21 nt, synthetic construct
  modified_base 1: mod_base = OTHER; note = 2'-O-methyladenosine
  modified_base 2: mod_base = OTHER; note = 2'-O-methyladenosine
  modified_base 3: mod_base = cm
  modified_base 4: mod_base = gm
  modified_base 5: mod_base = OTHER; note = 2'-O-methyladenosine
  modified_base 6: mod_base = cm
  modified_base 7: mod_base = OTHER; note = 2'-O-methyladenosine
  modified_base 8: mod_base = OTHER; note = 2'-O-methyladenosine
  modified_base 9: mod_base = OTHER; note = 2'-fluoroguanosine
  modified_base 10: mod_base = OTHER; note = 2'-fluoroadenosine
  modified_base 11: mod_base = OTHER; note = 2'-fluorocytidine
  modified_base 12: mod_base = OTHER; note = 2'-O-methyladenosine
  modified_base 13: mod_base = gm
  modified_base 14: mod_base = gm
  modified_base 15: mod_base = OTHER; note = 2'-O-methyladenosine
  modified_base 16: mod_base = um
  modified_base 17: mod_base = um
  modified_base 18: mod_base = cm
  modified_base 19: mod_base = um
  modified_base 20: mod_base = gm
  modified_base 21: mod_base = um
  source 1..21: mol_type = other RNA
aacgacaagacaggattctgt

SEQ ID NO: 1542 - RNA, 21 nt, synthetic construct
  source 1..21: mol_type = other RNA
taaccatgtttccctcctggt

SEQ ID NO: 1543 - RNA, 21 nt, synthetic construct
  source 1..21: mol_type = other RNA
tacttcaggaagctggttatc

SEQ ID NO: 1544 - RNA, 21 nt, synthetic construct
  source 1..21: mol_type = other RNA
taacaagtctgctatttgatg

SEQ ID NO: 1545 - RNA, 21 nt, synthetic construct
  source 1..21: mol_type = other RNA
tggaacaagtctgctatttgg

SEQ ID NO: 1546 - RNA, 21 nt, synthetic construct
  source 1..21: mol_type = other RNA
tgagtaagcaatctggtcctc

SEQ ID NO: 1547 - RNA, 21 nt, synthetic construct
  source 1..21: mol_type = other RNA
tgtctgagtaagcaatctggt

SEQ ID NO: 1548 - RNA, 21 nt, synthetic construct
  source 1..21: mol_type = other RNA
ttggtgtctgagtaagcaatc

SEQ ID NO: 1549 - RNA, 21 nt, synthetic construct
  source 1..21: mol_type = other RNA
ttaactttcttctctagcctg

SEQ ID NO: 1550 - RNA, 21 nt, synthetic construct
  source 1..21: mol_type = other RNA
tggttaaaatgcatctggaac

SEQ ID NO: 1551 - RNA, 21 nt, synthetic construct
  source 1..21: mol_type = other RNA
aactttcgttctgaagggtca

SEQ ID NO: 1552 - RNA, 21 nt, synthetic construct
  source 1..21: mol_type = other RNA
ttccatataactttcgttctg

SEQ ID NO: 1553 - RNA, 21 nt, synthetic construct
  source 1..21: mol_type = other RNA
tgattttccatataactttcg

SEQ ID NO: 1554 - RNA, 21 nt, synthetic construct
  source 1..21: mol_type = other RNA
aaagagtggtgattttccatg

SEQ ID NO: 1555 - RNA, 21 nt, synthetic construct
  source 1..21: mol_type = other RNA
tcatctaatattccaggacac

SEQ ID NO: 1556 - RNA, 21 nt, synthetic construct
  source 1..21: mol_type = other RNA
agtgttgtcatttttgagaac

SEQ ID NO: 1557 - RNA, 21 nt, synthetic construct
  source 1..21: mol_type = other RNA
tatgcttcaagtgttgtcatc

SEQ ID NO: 1558 - RNA, 21 nt, synthetic construct
  source 1..21: mol_type = other RNA
acaccatgcttcaagtgttgc

SEQ ID NO: 1559 - RNA, 21 nt, synthetic construct
  source 1..21: mol_type = other RNA
agttctgaaacaccatgcttc

SEQ ID NO: 1560 - RNA, 21 nt, synthetic construct
  source 1..21: mol_type = other RNA
tattgaagcattgagacacca

SEQ ID NO: 1561 - RNA, 21 nt, synthetic construct
  source 1..21: mol_type = other RNA
tgacattgaagcattgagacg

SEQ ID NO: 1562 - RNA, 21 nt, synthetic construct
  source 1..21: mol_type = other RNA
tgagttttcagaatcctgtcc

SEQ ID NO: 1563 - RNA, 21 nt, synthetic construct
  source 1..21: mol_type = other RNA
aagaactattccataatcagc

SEQ ID NO: 1564 - RNA, 21 nt, synthetic construct
  source 1..21: mol_type = other RNA
agaaagaactattccataatc

SEQ ID NO: 1565 - RNA, 21 nt, synthetic construct
  source 1..21: mol_type = other RNA
agatccagatctatggaaaac

SEQ ID NO: 1566 - RNA, 21 nt, synthetic construct
  source 1..21: mol_type = other RNA
atccaatgctgtctgagaagc

SEQ ID NO: 1567 - RNA, 21 nt, synthetic construct
  source 1..21: mol_type = other RNA
acctttaggaaatccaatgcc

SEQ ID NO: 1568 - RNA, 21 nt, synthetic construct
  source 1..21: mol_type = other RNA
tcacctttaggaaatccaatg

SEQ ID NO: 1569 - RNA, 21 nt, synthetic construct
  source 1..21: mol_type = other RNA
tggttttaaacaactgacatg

SEQ ID NO: 1570 - RNA, 21 nt, synthetic construct
  source 1..21: mol_type = other RNA
ttcatcagatcttagagttac

SEQ ID NO: 1571 - RNA, 21 nt, synthetic construct
  source 1..21: mol_type = other RNA
tttcatcagatcttagagttg

SEQ ID NO: 1572 - RNA, 21 nt, synthetic construct
  source 1..21: mol_type = other RNA
tcaagtttagtcaacttccca

SEQ ID NO: 1573 - RNA, 21 nt, synthetic construct
  source 1..21: mol_type = other RNA
tagcttccatttattcacagc

SEQ ID NO: 1574 - RNA, 21 nt, synthetic construct
  source 1..21: mol_type = other RNA
ttgatcacaagccaaaacctg

SEQ ID NO: 1575 - RNA, 21 nt, synthetic construct
  source 1..21: mol_type = other RNA
tcatagacatcgcatcctgaa

SEQ ID NO: 1576 - RNA, 21 nt, synthetic construct
  source 1..21: mol_type = other RNA
tcaaagagtggtgattttcca

SEQ ID NO: 1577 - RNA, 21 nt, synthetic construct
  source 1..21: mol_type = other RNA
ttctgaaacaccatgcttcaa

SEQ ID NO: 1578 - RNA, 21 nt, synthetic construct
  source 1..21: mol_type = other RNA
tcagaatcctgtcttgtcatt

SEQ ID NO: 1579 - RNA, 21 nt, synthetic construct
  source 1..21: mol_type = other RNA
tcaatgctgtctgagaagcag

SEQ ID NO: 1580 - RNA, 21 nt, synthetic construct
  source 1..21: mol_type = other RNA
tcctttaaaggttttcagtag

SEQ ID NO: 1581 - RNA, 21 nt, synthetic construct
  source 1..21: mol_type = other RNA
tacttcatcagatcttagagt

SEQ ID NO: 1582 - RNA, 21 nt, synthetic construct
  source 1..21: mol_type = other RNA
taagtttagtcaacttcccaa

SEQ ID NO: 1583 - RNA, 21 nt, synthetic construct
  source 1..21: mol_type = other RNA
tgtgtaggctgcactgagagt

SEQ ID NO: 1584 - RNA, 21 nt, synthetic construct
  source 1..21: mol_type = other RNA
ttgtgtaggctgcactgagag

SEQ ID NO: 1585 - RNA, 21 nt, synthetic construct
  source 1..21: mol_type = other RNA
tctttgtgtaggctgcactga

SEQ ID NO: 1586 - RNA, 21 nt, synthetic construct
  source 1..21: mol_type = other RNA
ttcctttgtgtaggctgcact

SEQ ID NO: 1587 - RNA, 21 nt, synthetic construct
  source 1..21: mol_type = other RNA
ttcgaagtgcaccaggcggta

SEQ ID NO: 1588 - RNA, 21 nt, synthetic construct
  source 1..21: mol_type = other RNA
tctcgaagtgcaccaggcggt

SEQ ID NO: 1589 - RNA, 21 nt, synthetic construct
  source 1..21: mol_type = other RNA
tgctcgaagtgcaccaggcgg

SEQ ID NO: 1590 - RNA, 21 nt, synthetic construct
  source 1..21: mol_type = other RNA
aggctcgaagtgcaccaggcg

SEQ ID NO: 1591 - RNA, 21 nt, synthetic construct
  source 1..21: mol_type = other RNA
aactcttcagtgtttccagcg

SEQ ID NO: 1592 - RNA, 21 nt, synthetic construct
  source 1..21: mol_type = other RNA
tacagggtctcccactttgat

SEQ ID NO: 1593 - RNA, 21 nt, synthetic construct
  source 1..21: mol_type = other RNA
acacagggtctcccactttga

SEQ ID NO: 1594 - RNA, 21 nt, synthetic construct
  source 1..21: mol_type = other RNA
tgtacacagggtctcccactt

SEQ ID NO: 1595 - RNA, 21 nt, synthetic construct
  source 1..21: mol_type = other RNA
aggtacacagggtctcccact

SEQ ID NO: 1596 - RNA, 21 nt, synthetic construct
  source 1..21: mol_type = other RNA
taggtacacagggtctcccac

SEQ ID NO: 1597 - RNA, 21 nt, synthetic construct
  source 1..21: mol_type = other RNA
tgaacaagtctgctatttgat

SEQ ID NO: 1598 - RNA, 21 nt, synthetic construct
  source 1..21: mol_type = other RNA
tgctttaactttcttctctag

SEQ ID NO: 1599 - RNA, 21 nt, synthetic construct
  source 1..21: mol_type = other RNA
tttgctttaactttcttctct

SEQ ID NO: 1600 - RNA, 21 nt, synthetic construct
  source 1..21: mol_type = other RNA
tgaaattacaatattgggcct

SEQ ID NO: 1601 - RNA, 21 nt, synthetic construct
  source 1..21: mol_type = other RNA
taactttcgttctgaagggtc

SEQ ID NO: 1602 - RNA, 21 nt, synthetic construct
  source 1..21: mol_type = other RNA
tcatataactttcgttctgaa

SEQ ID NO: 1603 - RNA, 21 nt, synthetic construct
  source 1..21: mol_type = other RNA
ttccataatcagttaaacggg

SEQ ID NO: 1604 - RNA, 21 nt, synthetic construct
  source 1..21: mol_type = other RNA
ttaggaaatccaatgctgtct

SEQ ID NO: 1605 - RNA, 21 nt, synthetic construct
  source 1..21: mol_type = other RNA
taaaggacaaaatggcaataa

SEQ ID NO: 1606 - RNA, 21 nt, synthetic construct
  source 1..21: mol_type = other RNA
taatcaaaggacaaaatggca

SEQ ID NO: 1607 - RNA, 21 nt, synthetic construct
  source 1..21: mol_type = other RNA
tcctttaaaggttttcagtgg

SEQ ID NO: 1608 - RNA, 21 nt, synthetic construct
  source 1..21: mol_type = other RNA
tgaaagaactattccataatc

SEQ ID NO: 1609 - RNA, 21 nt, synthetic construct
  source 1..21: mol_type = other RNA
tgtgttgtcatttttgagaac

SEQ ID NO: 1610 - RNA, 21 nt, synthetic construct
  source 1..21: mol_type = other RNA
tttgatcacaagccaaaacct

SEQ ID NO: 1611 - RNA, 21 nt, synthetic construct
  source 1..21: mol_type = other RNA
tgttgatcacaagccaaaacc

SEQ ID NO: 1612 - RNA, 21 nt, synthetic construct
  source 1..21: mol_type = other RNA
tagaaagaactattccataat

SEQ ID NO: 1613 - RNA, 21 nt, synthetic construct
  source 1..21: mol_type = other RNA
tagaaagaactattccatagt

SEQ ID NO: 1614 - RNA, 21 nt, synthetic construct
  source 1..21: mol_type = other RNA
tagaaagaactattccatagc

SEQ ID NO: 1615 - RNA, 21 nt, synthetic construct
  source 1..21: mol_type = other RNA
agtaagatctgaaactagtca

SEQ ID NO: 1616 - RNA, 21 nt, synthetic construct
  source 1..21: mol_type = other RNA
agttagtaagatctgaaacta

SEQ ID NO: 1617 - RNA, 21 nt, synthetic construct
  source 1..21: mol_type = other RNA
taagttagtaagatctgaaac

SEQ ID NO: 1618 - RNA, 21 nt, synthetic construct
  source 1..21: mol_type = other RNA
tcataaaacaagcacatgcac

SEQ ID NO: 1619 - RNA, 21 nt, synthetic construct
  source 1..21: mol_type = other RNA
ttgaacacttcgctttgtctc

SEQ ID NO: 1620 - RNA, 21 nt, synthetic construct
  source 1..21: mol_type = other RNA
agattctagaggtcactggaa

SEQ ID NO: 1621 - RNA, 21 nt, synthetic construct
  source 1..21: mol_type = other RNA
tggaatagtgtgcaaatgctc

SEQ ID NO: 1622 - RNA, 21 nt, synthetic construct
  source 1..21: mol_type = other RNA
ttgatctcaaacatctgtcat

SEQ ID NO: 1623 - RNA, 21 nt, synthetic construct
  source 1..21: mol_type = other RNA
tagcataagttgccacacaga

SEQ ID NO: 1624 - RNA, 21 nt, synthetic construct
  source 1..21: mol_type = other RNA
tcacaatcaaggtctggtctg

SEQ ID NO: 1625 - RNA, 21 nt, synthetic construct
  source 1..21: mol_type = other RNA
agaaagagagtgcttctccct

SEQ ID NO: 1626 - RNA, 21 nt, synthetic construct
  source 1..21: mol_type = other RNA
tgttagagagagtttggtttc

SEQ ID NO: 1627 - RNA, 21 nt, synthetic construct
  source 1..21: mol_type = other RNA
taaggttagagagagtttggt

SEQ ID NO: 1628 - RNA, 21 nt, synthetic construct
  source 1..21: mol_type = other RNA
tggttttgtaacttacatcac

SEQ ID NO: 1629 - RNA, 21 nt, synthetic construct
  source 1..21: mol_type = other RNA
tcactttcatcacaggtggtt

SEQ ID NO: 1630 - RNA, 21 nt, synthetic construct
  source 1..21: mol_type = other RNA
tgattataaatgcaccagtca

SEQ ID NO: 1631 - RNA, 21 nt, synthetic construct
  source 1..21: mol_type = other RNA
tagagttatagtcagagctgt

SEQ ID NO: 1632 - RNA, 21 nt, synthetic construct
  source 1..21: mol_type = other RNA
ttaggatgctctgtaaaggta

SEQ ID NO: 1633 - RNA, 21 nt, synthetic construct
  source 1..21: mol_type = other RNA
agttagacttaacttagttcc

SEQ ID NO: 1634 - RNA, 21 nt, synthetic construct
  source 1..21: mol_type = other RNA
agtaaattcaatctctctgag

SEQ ID NO: 1635 - RNA, 21 nt, synthetic construct
  source 1..21: mol_type = other RNA
tgttgatgttaaccagagctg

SEQ ID NO: 1636 - RNA, 21 nt, synthetic construct
  source 1..21: mol_type = other RNA
aaactatgatgtcaggtcaac

SEQ ID NO: 1637 - RNA, 21 nt, synthetic construct
  source 1..21: mol_type = other RNA
acattaacgagatctgtttga

SEQ ID NO: 1638 - RNA, 21 nt, synthetic construct
  source 1..21: mol_type = other RNA
tcagaatatagctttaagaac

SEQ ID NO: 1639 - RNA, 21 nt, synthetic construct
  source 1..21: mol_type = other RNA
agtagtaggtcctttgtgtag

SEQ ID NO: 1640 - RNA, 21 nt, synthetic construct
  source 1..21: mol_type = other RNA
ttgctatttgatgaggacgtc

SEQ ID NO: 1641 - RNA, 21 nt, synthetic construct
  source 1..21: mol_type = other RNA
atgtagaggtctcagttctga

SEQ ID NO: 1642 - RNA, 21 nt, synthetic construct
  source 1..21: mol_type = other RNA
aaagaaaatgtagaggtctca

SEQ ID NO: 1643 - RNA, 21 nt, synthetic construct
  source 1..21: mol_type = other RNA
acgaaaaatgtgaaaatcaca

SEQ ID NO: 1644 - RNA, 21 nt, synthetic construct
  source 1..21: mol_type = other RNA
ttactgaagtcctactaagtt

SEQ ID NO: 1645 - RNA, 21 nt, synthetic construct
  source 1..21: mol_type = other RNA
agataaacggagaagcaggag

SEQ ID NO: 1646 - RNA, 21 nt, synthetic construct
  source 1..21: mol_type = other RNA
acattctaggatattcttcca

SEQ ID NO: 1647 - RNA, 21 nt, synthetic construct
  source 1..21: mol_type = other RNA
taactgacatatgctttcctt

SEQ ID NO: 1648 - RNA, 21 nt, synthetic construct
  source 1..21: mol_type = other RNA
taggtacacagggtctcccat

SEQ ID NO: 1649 - RNA, 21 nt, synthetic construct
  source 1..21: mol_type = other RNA
taggtacacagggtctcctac

SEQ ID NO: 1650 - RNA, 21 nt, synthetic construct
  source 1..21: mol_type = other RNA
acagaatcctgtcttgtcatt

SEQ ID NO: 1651 - RNA, 21 nt, synthetic construct
  source 1..21: mol_type = other RNA
tcagaatcctgtcttgtcgtt

SEQ ID NO: 1652 - RNA, 21 nt, synthetic construct
  source 1..21: mol_type = other RNA
tcagaatcctgtcttgtcatc

SEQ ID NO: 1653 - RNA, 21 nt, synthetic construct
  source 1..21: mol_type = other RNA
acagaatcctgtcttgtcatc

SEQ ID NO: 1654 - RNA, 21 nt, synthetic construct
  source 1..21: mol_type = other RNA
aggcatctaatattccaggac

SEQ ID NO: 1655 - RNA, 21 nt, synthetic construct
  source 1..21: mol_type = other RNA
agcatctaatattccaggaca

SEQ ID NO: 1656 - RNA, 21 nt, synthetic construct
  source 1..21: mol_type = other RNA
aaggcatctaatattccagga

SEQ ID NO: 1657 - RNA, 21 nt, synthetic construct
  source 1..21: mol_type = other RNA
acagaatcctgtcttgtcgtt

SEQ ID NO: 1658 - RNA, 21 nt, synthetic construct
  modified_base 1: mod_base = i
  source 1..21: mol_type = other RNA
ncagaatcctgtcttgtcgtt

SEQ ID NO: 1659 - RNA, 21 nt, synthetic construct
  source 1..21: mol_type = other RNA
tattgaagcattgagacaccg

SEQ ID NO: 1660 - RNA, 21 nt, synthetic construct
  source 1..21: mol_type = other RNA
tattgaagcattgagacatcg

SEQ ID NO: 1661 - RNA, 21 nt, synthetic construct
  source 1..21: mol_type = other RNA
tcagaatcctgtcttgtcgtc

SEQ ID NO: 1662 - RNA, 21 nt, synthetic construct
  source 1..21: mol_type = other RNA
tttaactttcttctctagcct

SEQ ID NO: 1663 - RNA, 21 nt, synthetic construct
  source 1..21: mol_type = other RNA
tagaatcctgtcttgtcattc

SEQ ID NO: 1664 - RNA, 21 nt, synthetic construct
  source 1..21: mol_type = other RNA
ttcagaatcctgtcttgtcac

SEQ ID NO: 1665 - RNA, 21 nt, synthetic construct
  source 1..21: mol_type = other RNA
aggcatctaatattccaggtt

SEQ ID NO: 1666 - RNA, 21 nt, synthetic construct
  source 1..21: mol_type = other RNA
tgaaagaactagtccataatc

SEQ ID NO: 1667 - RNA, 21 nt, synthetic construct
  source 1..21: mol_type = other RNA
accaggagggaaacatggtta

SEQ ID NO: 1668 - RNA, 21 nt, synthetic construct
  source 1..21: mol_type = other RNA
gataaccagcttcctgaagta

SEQ ID NO: 1669 - RNA, 21 nt, synthetic construct
  source 1..21: mol_type = other RNA
catcaaatagcagacttgtta

SEQ ID NO: 1670 - RNA, 21 nt, synthetic construct
  modified_base 16: mod_base = i
  source 1..21: mol_type = other RNA
ccaaatagcagacttnttcca

SEQ ID NO: 1671 - RNA, 21 nt, synthetic construct
  source 1..21: mol_type = other RNA
gaggaccagattgcttactca

SEQ ID NO: 1672 - RNA, 21 nt, synthetic construct
  source 1..21: mol_type = other RNA
accagattgcttactcagaca

SEQ ID NO: 1673 - RNA, 21 nt, synthetic construct
  source 1..21: mol_type = other RNA
gattgcttactcagacaccaa

SEQ ID NO: 1674 - RNA, 21 nt, synthetic construct
  source 1..21: mol_type = other RNA
caggctagagaagaaagttaa

SEQ ID NO: 1675 - RNA, 21 nt, synthetic construct
  source 1..21: mol_type = other RNA
gttccagatgcattttaacca

SEQ ID NO: 1676 - RNA, 21 nt, synthetic construct
  source 1..21: mol_type = other RNA
tgacccttcagaacgaaagtt

SEQ ID NO: 1677 - RNA, 21 nt, synthetic construct
  source 1..21: mol_type = other RNA
cagaacgaaagttatatggaa

SEQ ID NO: 1678 - RNA, 21 nt, synthetic construct
  source 1..21: mol_type = other RNA
cgaaagttatatggaaaatca

SEQ ID NO: 1679 - RNA, 21 nt, synthetic construct
  source 1..21: mol_type = other RNA
catggaaaatcaccactcttt

SEQ ID NO: 1680 - RNA, 21 nt, synthetic construct
  source 1..21: mol_type = other RNA
gtgtcctggaatattagatga

SEQ ID NO: 1681 - RNA, 21 nt, synthetic construct
  source 1..21: mol_type = other RNA
gttctcaaaaatgacaacact

SEQ ID NO: 1682 - RNA, 21 nt, synthetic construct
  source 1..21: mol_type = other RNA
gatgacaacacttgaagcata

SEQ ID NO: 1683 - RNA, 21 nt, synthetic construct
  source 1..21: mol_type = other RNA
gcaacacttgaagcatggtgt

SEQ ID NO: 1684 - RNA, 21 nt, synthetic construct
  source 1..21: mol_type = other RNA
gaagcatggtgtttcagaact

SEQ ID NO: 1685 - RNA, 21 nt, synthetic construct
  source 1..21: mol_type = other RNA
tggtgtctcaatgcttcaata

SEQ ID NO: 1686 - RNA, 21 nt, synthetic construct
  source 1..21: mol_type = other RNA
cgtctcaatgcttcaatgtca

SEQ ID NO: 1687 - RNA, 21 nt, synthetic construct
  source 1..21: mol_type = other RNA
ggacaggattctgaaaactca

SEQ ID NO: 1688 - RNA, 21 nt, synthetic construct
  source 1..21: mol_type = other RNA
gctgattatggaatagttctt

SEQ ID NO: 1689 - RNA, 21 nt, synthetic construct
  source 1..21: mol_type = other RNA
gattatggaatagttctttct

SEQ ID NO: 1690 - RNA, 21 nt, synthetic construct
  modified_base 16: mod_base = i
  source 1..21: mol_type = other RNA
gttttccatagatctngatct

SEQ ID NO: 1691 - RNA, 21 nt, synthetic construct
  source 1..21: mol_type = other RNA
gcttctcagacagcattggat

SEQ ID NO: 1692 - RNA, 21 nt, synthetic construct
  source 1..21: mol_type = other RNA
ggcattggatttcctaaaggt

SEQ ID NO: 1693 - RNA, 21 nt, synthetic construct
  modified_base 20: mod_base = i
  source 1..21: mol_type = other RNA
cattggatttcctaaaggtna

SEQ ID NO: 1694 - RNA, 21 nt, synthetic construct
  source 1..21: mol_type = other RNA
catgtcagttgtttaaaacca

SEQ ID NO: 1695 - RNA, 21 nt, synthetic construct
  source 1..21: mol_type = other RNA
gtaactctaagatctgatgaa

SEQ ID NO: 1696 - RNA, 21 nt, synthetic construct
  source 1..21: mol_type = other RNA
caactctaagatctgatgaaa

SEQ ID NO: 1697 - RNA, 21 nt, synthetic construct
  source 1..21: mol_type = other RNA
tgggaagttgactaaacttga

SEQ ID NO: 1698 - RNA, 21 nt, synthetic construct
  source 1..21: mol_type = other RNA
gctgtgaataaatggaagcta

SEQ ID NO: 1699 - RNA, 21 nt, synthetic construct
  source 1..21: mol_type = other RNA
caggttttggcttgtgatcaa

SEQ ID NO: 1700 - RNA, 21 nt, synthetic construct
  source 1..21: mol_type = other RNA
ttcaggatgcgatgtctatga

SEQ ID NO: 1701 - RNA, 21 nt, synthetic construct
  source 1..21: mol_type = other RNA
tggaaaatcaccactctttga

SEQ ID NO: 1702 - RNA, 21 nt, synthetic construct
  source 1..21: mol_type = other RNA
ttgaagcatggtgtttcagaa

SEQ ID NO: 1703 - RNA, 21 nt, synthetic construct
  source 1..21: mol_type = other RNA
aatgacaagacaggattctga

SEQ ID NO: 1704 - RNA, 21 nt, synthetic construct
  source 1..21: mol_type = other RNA
ctgcttctcagacagcattga

SEQ ID NO: 1705 - RNA, 21 nt, synthetic construct
  source 1..21: mol_type = other RNA
ctactgaaaacctttaaagga

SEQ ID NO: 1706 - RNA, 21 nt, synthetic construct
  source 1..21: mol_type = other RNA
actctaagatctgatgaagta

SEQ ID NO: 1707 - RNA, 21 nt, synthetic construct
  source 1..21: mol_type = other RNA
ttgggaagttgactaaactta

SEQ ID NO: 1708 - RNA, 21 nt, synthetic construct
  source 1..21: mol_type = other RNA
ctgcttctcagacagtattga

SEQ ID NO: 1709 - RNA, 21 nt, synthetic construct
  source 1..21: mol_type = other RNA
actctcagtgcagcctacaca

SEQ ID NO: 1710 - RNA, 21 nt, synthetic construct
  source 1..21: mol_type = other RNA
ctctcagtgcagcctacacaa

SEQ ID NO: 1711 - RNA, 21 nt, synthetic construct
  source 1..21: mol_type = other RNA
tcagtgcagcctacacaaaga

SEQ ID NO: 1712 - RNA, 21 nt, synthetic construct
  source 1..21: mol_type = other RNA
agtgcagcctacacaaaggaa

SEQ ID NO: 1713 - RNA, 21 nt, synthetic construct
  source 1..21: mol_type = other RNA
taccgcctggtgcacttcgaa

SEQ ID NO: 1714 - RNA, 21 nt, synthetic construct
  source 1..21: mol_type = other RNA
accgcctggtgcacttcgaga

SEQ ID NO: 1715 - RNA, 21 nt, synthetic construct
  source 1..21: mol_type = other RNA
ccgcctggtgcacttcgagca

SEQ ID NO: 1716 - RNA, 21 nt, synthetic construct
  source 1..21: mol_type = other RNA
cgcctggtgcacttcgagcct

SEQ ID NO: 1717 - RNA, 21 nt, synthetic construct
  source 1..21: mol_type = other RNA
cgctggaaacactgaagagtt

SEQ ID NO: 1718 - RNA, 21 nt, synthetic construct
  source 1..21: mol_type = other RNA
atcaaagtgggagaccctgta

SEQ ID NO: 1719 - RNA, 21 nt, synthetic construct
  source 1..21: mol_type = other RNA
tcaaagtgggagaccctgtgt

SEQ ID NO: 1720 - RNA, 21 nt, synthetic construct
  source 1..21: mol_type = other RNA
aagtgggagaccctgtgtaca

SEQ ID NO: 1721 - RNA, 21 nt, synthetic construct
  source 1..21: mol_type = other RNA
agtgggagaccctgtgtacct

SEQ ID NO: 1722 - RNA, 21 nt, synthetic construct
  source 1..21: mol_type = other RNA
gtgggagaccctgtgtaccta

SEQ ID NO: 1723 - RNA, 21 nt, synthetic construct
  source 1..21: mol_type = other RNA
atcaaatagcagacttgttca

SEQ ID NO: 1724 - RNA, 21 nt, synthetic construct
  source 1..21: mol_type = other RNA
ctagagaagaaagttaaagca

SEQ ID NO: 1725 - RNA, 21 nt, synthetic construct
  source 1..21: mol_type = other RNA
agagaagaaagttaaagcaaa

SEQ ID NO: 1726 - RNA, 21 nt, synthetic construct
  source 1..21: mol_type = other RNA
aggcccaatattgtaatttca

SEQ ID NO: 1727 - RNA, 21 nt, synthetic construct
  source 1..21: mol_type = other RNA
gacccttcagaacgaaagtta

SEQ ID NO: 1728 - RNA, 21 nt, synthetic construct
  source 1..21: mol_type = other RNA
ttcagaacgaaagttatatga

SEQ ID NO: 1729 - RNA, 21 nt, synthetic construct
  source 1..21: mol_type = other RNA
cccgtttaactgattatggaa

SEQ ID NO: 1730 - RNA, 21 nt, synthetic construct
  source 1..21: mol_type = other RNA
agacagcattggatttcctaa

SEQ ID NO: 1731 - RNA, 21 nt, synthetic construct
  source 1..21: mol_type = other RNA
ttattgccattttgtccttta

SEQ ID NO: 1732 - RNA, 21 nt, synthetic construct
  source 1..21: mol_type = other RNA
tgccattttgtcctttgatta

SEQ ID NO: 1733 - RNA, 21 nt, synthetic construct
  source 1..21: mol_type = other RNA
ccactgaaaacctttaaagga

SEQ ID NO: 1734 - RNA, 21 nt, synthetic construct
  source 1..21: mol_type = other RNA
gattatggaatagttctttca

SEQ ID NO: 1735 - RNA, 21 nt, synthetic construct
  source 1..21: mol_type = other RNA
gttctcaaaaatgacaacaca

SEQ ID NO: 1736 - RNA, 21 nt, synthetic construct
  source 1..21: mol_type = other RNA
aggttttggcttgtgatcaaa

SEQ ID NO: 1737 - RNA, 21 nt, synthetic construct
  source 1..21: mol_type = other RNA
ggttttggcttgtgatcaaca

SEQ ID NO: 1738 - RNA, 21 nt, synthetic construct
  source 1..21: mol_type = other RNA
attatggaatagttctttcta

SEQ ID NO: 1739 - RNA, 21 nt, synthetic construct
  source 1..21: mol_type = other RNA
actatggaatagttctttcta

SEQ ID NO: 1740 - RNA, 21 nt, synthetic construct
  source 1..21: mol_type = other RNA
gctatggaatagttctttcta

SEQ ID NO: 1741 - RNA, 21 nt, synthetic construct
  source 1..21: mol_type = other RNA
tgactagtttcagatcttact

SEQ ID NO: 1742 - RNA, 21 nt, synthetic construct
  source 1..21: mol_type = other RNA
tagtttcagatcttactaact

SEQ ID NO: 1743 - RNA, 21 nt, synthetic construct
  source 1..21: mol_type = other RNA
gtttcagatcttactaactta

SEQ ID NO: 1744 - RNA, 21 nt, synthetic construct
  source 1..21: mol_type = other RNA
gtgcatgtgcttgttttatga

SEQ ID NO: 1745 - RNA, 21 nt, synthetic construct
  source 1..21: mol_type = other RNA
gagacaaagcgaagtgttcaa

SEQ ID NO: 1746 - RNA, 21 nt, synthetic construct
  source 1..21: mol_type = other RNA
ttccagtgacctctagaatct

SEQ ID NO: 1747 - RNA, 21 nt, synthetic construct
  source 1..21: mol_type = other RNA
gagcatttgcacactattcca

SEQ ID NO: 1748 - RNA, 21 nt, synthetic construct
  source 1..21: mol_type = other RNA
atgacagatgtttgagatcaa

SEQ ID NO: 1749 - RNA, 21 nt, synthetic construct
  source 1..21: mol_type = other RNA
tctgtgtggcaacttatgcta

SEQ ID NO: 1750 - RNA, 21 nt, synthetic construct
  source 1..21: mol_type = other RNA
cagaccagaccttgattgtga

SEQ ID NO: 1751 - RNA, 21 nt, synthetic construct
  source 1..21: mol_type = other RNA
agggagaagcactctctttct

SEQ ID NO: 1752 - RNA, 21 nt, synthetic construct
  source 1..21: mol_type = other RNA
gaaaccaaactctctctaaca

SEQ ID NO: 1753 - RNA, 21 nt, synthetic construct
  source 1..21: mol_type = other RNA
accaaactctctctaacctta

SEQ ID NO: 1754 - RNA, 21 nt, synthetic construct
  source 1..21: mol_type = other RNA
gtgatgtaagttacaaaacca

SEQ ID NO: 1755 - RNA, 21 nt, synthetic construct
  source 1..21: mol_type = other RNA
aaccacctgtgatgaaagtga

SEQ ID NO: 1756 - RNA, 21 nt, synthetic construct
  source 1..21: mol_type = other RNA
tgactggtgcatttataatca

SEQ ID NO: 1757 - RNA, 21 nt, synthetic construct
  source 1..21: mol_type = other RNA
acagctctgactataactcta

SEQ ID NO: 1758 - RNA, 21 nt, synthetic construct
  source 1..21: mol_type = other RNA
tacctttacagagcatcctaa

SEQ ID NO: 1759 - RNA, 21 nt, synthetic construct
  source 1..21: mol_type = other RNA
ggaactaagttaagtctaact

SEQ ID NO: 1760 - RNA, 21 nt, synthetic construct
  source 1..21: mol_type = other RNA
ctcagagagattgaatttact

SEQ ID NO: 1761 - RNA, 21 nt, synthetic construct
  source 1..21: mol_type = other RNA
cagctctggttaacatcaaca

SEQ ID NO: 1762 - RNA, 21 nt, synthetic construct
  source 1..21: mol_type = other RNA
gttgacctgacatcatagttt

SEQ ID NO: 1763 - RNA, 21 nt, synthetic construct
  source 1..21: mol_type = other RNA
tcaaacagatctcgttaatgt

SEQ ID NO: 1764 - RNA, 21 nt, synthetic construct
  source 1..21: mol_type = other RNA
gttcttaaagctatattctga

SEQ ID NO: 1765 - RNA, 21 nt, synthetic construct
  source 1..21: mol_type = other RNA
ctacacaaaggacctactact

SEQ ID NO: 1766 - RNA, 21 nt, synthetic construct
  source 1..21: mol_type = other RNA
gacgtcctcatcaaatagcaa

SEQ ID NO: 1767 - RNA, 21 nt, synthetic construct
  source 1..21: mol_type = other RNA
tcagaactgagacctctacat

SEQ ID NO: 1768 - RNA, 21 nt, synthetic construct
  source 1..21: mol_type = other RNA
tgagacctctacattttcttt

SEQ ID NO: 1769 - RNA, 21 nt, synthetic construct
  source 1..21: mol_type = other RNA
tgtgattttcacatttttcgt

SEQ ID NO: 1770 - RNA, 21 nt, synthetic construct
  source 1..21: mol_type = other RNA
aacttagtaggacttcagtaa

SEQ ID NO: 1771 - RNA, 21 nt, synthetic construct
  source 1..21: mol_type = other RNA
ctcctgcttctccgtttatct

SEQ ID NO: 1772 - RNA, 21 nt, synthetic construct
  source 1..21: mol_type = other RNA
tggaagaatatcctagaatgt

SEQ ID NO: 1773 - RNA, 21 nt, synthetic construct
  source 1..21: mol_type = other RNA
aaggaaagcatatgtcagtta

SEQ ID NO: 1774 - RNA, 21 nt, synthetic construct
  modified_base 19: mod_base = i
  source 1..21: mol_type = other RNA
ctactgaaaacctttaaanga

SEQ ID NO: 1775 - RNA, 21 nt, synthetic construct
  source 1..21: mol_type = other RNA
gtgggagaccctgtgtatcta

SEQ ID NO: 1776 - RNA, 21 nt, synthetic construct
  source 1..21: mol_type = other RNA
aatgacaagacaggattctgt

SEQ ID NO: 1777 - RNA, 21 nt, synthetic construct
  source 1..21: mol_type = other RNA
aacgacaagacaggattctga

SEQ ID NO: 1778 - RNA, 21 nt, synthetic construct
  source 1..21: mol_type = other RNA
gatgacaagacaggattctga

SEQ ID NO: 1779 - RNA, 21 nt, synthetic construct
  source 1..21: mol_type = other RNA
gatgacaagacaggattctgt

SEQ ID NO: 1780 - RNA, 21 nt, synthetic construct
  source 1..21: mol_type = other RNA
gtcctggaatattagatgcct

SEQ ID NO: 1781 - RNA, 21 nt, synthetic construct
  source 1..21: mol_type = other RNA
tgtcctggaatattagatgct

SEQ ID NO: 1782 - RNA, 21 nt, synthetic construct
  source 1..21: mol_type = other RNA
tcctggaatattagatgcctt

SEQ ID NO: 1783 - RNA, 21 nt, synthetic construct
  source 1..21: mol_type = other RNA
aacgacaagacaggattctgt

SEQ ID NO: 1784 - RNA, 21 nt, synthetic construct
  source 1..21: mol_type = other RNA
cggtgtctcaatgcttcaata

SEQ ID NO: 1785 - RNA, 21 nt, synthetic construct
  source 1..21: mol_type = other RNA
cgatgtctcaatgcttcaata

SEQ ID NO: 1786 - RNA, 21 nt, synthetic construct
  source 1..21: mol_type = other RNA
gacgacaagacaggattctga

SEQ ID NO: 1787 - RNA, 21 nt, synthetic construct
  source 1..21: mol_type = other RNA
aggctagagaagaaagttaaa

SEQ ID NO: 1788 - RNA, 21 nt, synthetic construct
  source 1..21: mol_type = other RNA
gaatgacaagacaggattcta

SEQ ID NO: 1789 - RNA, 21 nt, synthetic construct
  source 1..21: mol_type = other RNA
gtgacaagacaggattctgaa

SEQ ID NO: 1790 - RNA, 20 nt, synthetic construct
  source 1..20: mol_type = other RNA
cctggaatattagatgcctt

SEQ ID NO: 1791 - RNA, 21 nt, synthetic construct
  source 1..21: mol_type = other RNA
gattatggaataggtctttca

1. An RNAi agent for inhibiting expression of a MARC1 gene, comprising:
an antisense strand comprising a nucleotide sequence of at least 15 contiguous nucleotides differing by 0 or 1 nucleotides from 15 contiguous nucleotides of any one of the antisense strand sequences of Table 2, Table 3, or Table 6D; and
a sense strand comprising a nucleotide sequence that is at least partially complementary to the antisense strand.

2. The RNAi agent of claim 1, wherein the antisense strand comprises nucleotides 2-18 of any one of the sequences provided in Table 2, Table 3, or Table 6D.

3. The RNAi agent of claim 1 or claim 2, wherein the sense strand comprises a nucleotide sequence of at least 15 contiguous nucleotides differing by 0 or 1 nucleotides from 15 contiguous nucleotides of any one of the sense strand sequences of Table 2, Table 4, Table 5, or Table 6D, and wherein the sense strand has a region of at least 85% complementarity over at least 15 contiguous nucleotides to the antisense strand.

4. The RNAi agent of any one of claims 1-3, wherein at least one nucleotide of the RNAi agent includes a modified internucleoside linkage.

5. The RNAi agent of any one of claims 1-4, wherein all or substantially all of the nucleotides are modified nucleotides.

6. The RNAi agent of any one of claims 4-5, wherein the modified nucleotides are independently selected from the group consisting of: 2′-O-methyl nucleotide, 2′-fluoro nucleotide, 2′-deoxy nucleotide, 2′,3′-seco nucleotide mimic, locked nucleotide, 2′-F-arabino nucleotide, 2′-methoxyethyl nucleotide, abasic nucleotide, ribitol, inverted nucleotide, inverted 2′-O-methyl nucleotide, inverted 2′-deoxy nucleotide, 2′-amino-modified nucleotide, 2′-alkyl-modified nucleotide, morpholino nucleotide, vinyl phosphonate-containing nucleotide, cyclopropyl phosphonate-containing nucleotide, and 3′-O-methyl nucleotide.

7. The RNAi agent of claim 5, wherein all or substantially all of the modified nucleotides are 2′-O-methyl nucleotides, 2′-fluoro nucleotides, or combinations thereof.

8. The RNAi agent of any one of claims 1-7, wherein the antisense strand consists of or consists essentially of the nucleotide sequence of any one of the modified antisense strand sequences of Table 3 or Table 6D.

9. The RNAi agent of any one of claims 1-8 wherein the sense strand consists of, consists essentially of, or comprises the nucleotide sequence of any of the modified sense strand sequences of Table 4, Table 5, or Table 6D.

10. The RNAi agent of claim 1, wherein the antisense strand comprises the nucleotide sequence of any one of the modified sequences of Table 3, and the sense strand comprises the nucleotide sequence of any one of the modified sequences of Table 4, Table 5, or Table 6D.

11. The RNAi agent of any one of claims 1-10, wherein the sense strand is between 18 and 30 nucleotides in length, and the antisense strand is between 18 and 30 nucleotides in length.

12. The RNAi agent of claim 11, wherein the sense strand and the antisense strand are each between 18 and 27 nucleotides in length.

13. The RNAi agent of claim 12, wherein the sense strand and the antisense strand are each between 18 and 24 nucleotides in length.

14. The RNAi agent of claim 13, wherein the sense strand and the antisense strand are each 21 nucleotides in length.

15. The RNAi agent of claim 14, wherein the RNAi agent has two blunt ends.

16. The RNAi agent of any one of claims 1-15, wherein the sense strand comprises one or two terminal caps.

17. The RNAi agent of any one of claims 1-16, wherein the sense strand comprises one or two inverted abasic residues.

18. The RNAi agent of claim 1, wherein the RNAi agent is comprised of a sense strand and an antisense strand that form a duplex having the structure of any one of the duplexes in Table 6A and Table 6B.

19. The RNAi agent of claim 18, wherein all or substantially all of the nucleotides are modified nucleotides.

20. The RNAi agent of claim 1, comprising an antisense strand that consists of, consists essentially of, or comprises a nucleotide sequence that differs by 0 or 1 nucleotides from one of the following nucleotide sequences (5′→3′):
(SEQ ID NO: 1608)
UGAAAGAACUAUUCCAUAAUC;
(SEQ ID NO: 1657)
ACAGAAUCCUGUCUUGUCGUU;
(SEQ ID NO: 1580)
UCCUUUAAAGGUUUUCAGUAG;
or
(SEQ ID NO: 1659)
UAUUGAAGCAUUGAGACACCG.

21. The RNAi agent of any one of claims 1-20, wherein the nucleotides of the antisense strand located at position 2 and position 14 from the 5′-end are 2′-fluoro modified nucleotides.

22. The RNAi agent of claim 21, wherein the nucleotide of the antisense strand at position 2 is a 2′-fluoro uridine, and the nucleotide of the antisense strand at position 14 is a 2′-fluoro cytidine, and wherein the antisense strand comprises 3 or 4 phosphorothioate internucleoside linkages.

23. The RNAi agent of any one of claims 1-22, wherein the sense strand consists of, consists essentially of, or comprises a nucleotide sequence that differs by 0 or 1 nucleotides from one of the following nucleotide sequences (5′→3′):
(SEQ ID NO: 1734)
GAUUAUGGAAUAGUUCUUUCA;
(SEQ ID NO: 1783)
AACGACAAGACAGGAUUCUGU;
(SEQ ID NO: 1774)
CUACUGAAAACCUUUAAAIGA;
or
(SEQ ID NO: 1784)
CGGUGUCUCAAUGCUUCAAUA

24. The RNAi agent of any one of claims 20-23, wherein all or substantially all of the nucleotides are modified nucleotides.

25. The RNAi agent of claim 1, comprising an antisense strand that comprises, consists of, or consists essentially of a modified nucleotide sequence that differs by 0 or 1 nucleotides from one of the following nucleotide sequences (5′→3′):
(SEQ ID NO: 1143)
cPrpusGfaaaGfaacuaUfuCfcAfuaausc;
(SEQ ID NO: 1228)
asCfagAfauccugUfcUfuGfucgusu;
(SEQ ID NO: 1229)
isCfagAfauccugUfcUfuGfucgusu;
(SEQ ID NO: 1200)
cPrpusCfscsUfuUfaaaggUfuUfuCfaGfuasg;
or
(SEQ ID NO: 1235)
usAfsusugaAfgcauUfgAfgAfcaccsg,
wherein a represents 2′-O-methyl adenosine, c represents 2′-O-methyl cytidine, g represents 2′-O-methyl guanosine, i represents 2′-O-methyl inosine; and u represents 2′-O-methyl uridine: Af, represents 2′-fluoro adenosine, Cf represents 2′-fluoro cytidine, Gf represents 2′-fluoro guanosine, and Uf represents 2′-fluoro uridine: cPrpu represents a 5′-cyclopropyl phosphonate-2′-O-methyl uridine: s represents a phosphorothioate linkage; and wherein all or substantially all of the nucleotides on the sense strand are modified nucleotides.

26. The RNAi agent of claim 1, wherein the sense strand comprises, consists of, or consists essentially of a modified nucleotide sequence that differs by 0 or 1 nucleotides from one of the following nucleotide sequences (5′→3′):
(SEQ ID NO: 1319)
gauuauggAfAfUfaguucuuuca;
(SEQ ID NO: 1376)
aacgacaaGfAfCfaggauucugu;
(SEQ ID NO: 1361)
cuacugaaAfAfCfcuuuaaaiga;
or
(SEQ ID NO: 1377)
cggugucuCfAfAfugcuucaaua,
wherein a represents 2′-O-methyl adenosine, c represents 2′-O-methyl cytidine, g represents 2′-O-methyl guanosine, u represents 2′-O-methyl uridine, and i represents 2′-O-methyl inosine; Af, represents 2′-fluoro adenosine, Cf represents 2′-fluoro cytidine, Gf represents 2′-fluoro guanosine, and Uf represents 2′-fluoro uridine; s represents a phosphorothioate linkage; and wherein all or substantially all of the nucleotides on the antisense strand are modified nucleotides.

27. The RNAi agent of any one of claims 20-26, wherein the sense strand further includes inverted abasic residues at the 3′ terminal end of the nucleotide sequence, at the 5′ end of the nucleotide sequence, or at both.

28. The RNAi agent of any one of claims 1-27, wherein the RNAi agent is linked to a targeting ligand.

29. The RNAi agent of any one of claims 1-28, wherein the sense strand comprises:

[chemical structure]

30. The RNAi agent of any one of claims 1-29, wherein the targeting ligand is linked to the sense strand.

31. The RNAi agent of claim 30, wherein the targeting ligand is linked to the 5′ terminal end of the sense strand.

32. A composition comprising the RNAi agent of any one of claims 1-31, wherein the composition further comprises a pharmaceutically acceptable excipient.

33. The composition of claim 32, further comprising a second RNAi agent capable of inhibiting the expression of a MARC1 gene.

34. The composition of any one of claims 32-33, further comprising one or more additional therapeutics.

35. The composition of any one of claims 32-34, wherein the composition is formulated for administration.

36. The composition of claim 35, wherein the composition is delivered by subcutaneous injection.

37. The composition of any one of claim 32-36, wherein the pharmaceutically acceptable excipient is a sodium phosphate buffer.

38. The composition of any one of claim 32-36, wherein the pharmaceutically acceptable excipient is isotonic saline or water for injection.

39. A method for inhibiting expression of a MARC1 gene in a hepatocyte cell, the method comprising introducing into a cell of a subject an effective amount of an RNAi agent of any one of claims 1-31 or the composition of any one of claims 32-38.

40. The method of claim 39, wherein the subject is a human subject.

41. The method of any one of claims 39-40, wherein the MARC1 mRNA levels are reduced by at least about 50% in the hepatocyte cell or in the subject.

42. The method of any one of claims 39-41, wherein the MARC1 protein levels are reduced by at least about 50% in the hepatocyte cell or in the subject.

43. A method of treating a MARC1-related disease, disorder, or symptom, the method comprising administering to a human subject in need thereof a therapeutically effective amount of the composition of any one of claims 32-38.

44. The method of claim 43, wherein the disease is nonalcoholic steatohepatitis (NASH), nonalcoholic fatty liver disease (NAFLD), alcoholic fatty liver disease, autoimmune hepatitis, hepatic fibrosis, cirrhosis, elevated blood cholesterol levels, hypertriglyceridemia, liver disease, and/or other MARC1-related disease.

45. The method of any one of claims 39-44, wherein the level of serum MARC1 protein is decreased in the subject.

46. The method of any one of claims 39-45, wherein the RNAi agent is administered to a human subject at a dose of about 0.05 mg/kg to about 5.0 mg/kg of body weight of the human subject.

47. Use of the RNAi agent of any one of claims 1-31 or the composition according to any one of claims 32-38, for the treatment of a disease, disorder, or symptom that is mediated at least in part by a reduction in MARC1 gene expression.

48. Use according to claim 47, wherein the disease is nonalcoholic steatohepatitis (NASH), nonalcoholic fatty liver disease (NAFLD), alcoholic fatty liver disease, autoimmune hepatitis, hepatic fibrosis, cirrhosis, elevated blood cholesterol levels, hypertriglyceridemia, liver disease, and/or other MARC1-related disease.

49. Use of the RNAi agent of any one of claims 1-31 or the composition according to any one of claims 32-38, for the preparation of a pharmaceutical composition for treating a disease, disorder, or symptom that is mediated at least in part by a reduction in MARC1 gene expression.

50. Use according to any one of claims 47-49, wherein the RNAi agent is administered to a human subject at a dose of about 0.05 mg/kg to about 5.0 mg/kg of body weight of the human subject.
